(19) United States
(12) Patent Application Publication
(10) Pub. No.: US 2024/0309076 A1
(43) Pub. Date: Sep. 19, 2024

(54) TAU-SPECIFIC ANTIBODY GENE THERAPY COMPOSITIONS, METHODS AND USES THEREOF

(71) Applicants: REGENXBIO INC., Rockville, MD (US); NEURIMMUNE AG, Schlieren (CH)

(72) Inventors: Danielle Sliter, Rockville, MD (US); Joseph Bruder, Gaithersburg, MD (US); Devin McDougald, Boston, MA (US); Fabio Montrasio, Schlieren (CH); Jan Grimm, Schlieren (CH); Chunping Qiao, Chapel Hill, NC (US)

(21) Appl. No.: 18/259,734

(22) PCT Filed: Dec. 29, 2021
(86) PCT No.: PCT/US2021/065465

§ 371 Date: Jun. 28, 2023

Related U.S. Application Data
(60) Provisional application No. 63/131,660, filed on Dec. 29, 2020.
(60) Provisional application No. 63/139,496, filed on Jan. 20, 2021.

(30) Foreign Application Priority Data
Jan. 20, 2021 (EP) 21150810

(51) Int. Cl. C07K 16/18; A61K 39/00; A61P 25/28; C12N 15/86

(52) U.S. Cl. CPC C07K 16/18; A61P 25/28; C12N 15/86; A61K 2039/505; C07K 2317/34; C07K 2317/522; C07K 2317/565; C07K 2317/622; C07K 2317/64; C07K 2319/02; C12N 2750/14143

(57) ABSTRACT

The present invention relates to nucleic acid expression cassettes that are engineered to express Tau-specific antibodies. Vectors and methods of employing the expression cassettes containing novel Tau-specific antibodies are provided. The invention is particularly useful for delivery of transgenes to target CNS cells and confers desirable properties for CNS-directed gene therapy. Moreover, the invention relates to a novel method of engineering, and expressing Tau-specific antibody transgenes for example within CNS cells, and delivery of therapeutics for treating various tauopathic diseases and disorders.

### CROSS-REFERENCE TO RELATED APPLICATIONS

[0001] This application is a national stage filing under 35 U.S.C. § 371 of International Application No. PCT/US2021/65465, filed Dec. 29, 2021, which claims the benefit of priority to US Provisional Application Number 63,139,496 filed on Jan. 20, 2021 and US Provisional Application Number 63,131,660 filed on Dec. 29, 2020 and EP Application 21150810 filed on Jan. 8, 2021. The entire contents of the aforementioned applications are incorporated by reference in their entireties.

### 1. FIELD OF THE INVENTION

[0002] The present invention relates to Tau-specific human-derived monoclonal antibodies (“mAbs”) and Tau-binding fragments and variants thereof engineered to be delivered for therapeutic use by viral vectors, methods of making and employing the viral vectors and uses thereof. Use of the biotherapeutic proteins delivered to target cells by expression from viral vectors in the central nervous system (CNS) confers desirable properties for gene therapy. In particular, the invention provides nucleic acid regulatory elements operably linked to a heterologous gene (transgene) inserted into an expression cassette, such that the regulatory elements drive and control expression of an anti-Tau transgene in CNS cells. Provided are methods to target CNS tissues, in particular, with expression cassettes comprising the anti-Tau transgene, using viral vectors suitable for various routes of administration and use in the treatment of tauopathies. As such, compositions and methods are described for the long-term expression of a human therapeutic Tau-specific mAb or the antigen-binding fragment of a therapeutic Tau-specific mAb in the CNS.

### 2. BACKGROUND

[0003] Protein accumulation, modifications and aggregation are pathological aspects of numerous neurodegenerative diseases. Pathologically modified and aggregated Tau, including hyperphosphorylated Tau conformers, are an invariant hallmark of tauopathies and correlate with disease severity.

[0004] Tau is a microtubule-associated protein expressed in the central nervous system with a primary function to stabilize microtubules. There are six major isoforms of Tau expressed mainly in the adult human brain, which are derived from a single gene by alternative splicing. Under pathological conditions, the Tau protein becomes hyperphosphorylated, resulting in a loss of tubulin binding and destabilization of microtubules followed by the aggregation and deposition of Tau in pathogenic neurofibrillary tangles. There is compelling evidence that Tau hyperphosphorylation and the subsequent formation of higher order multimeric structures leads to neuronal dysfunction and death. For example, there is a strong correlation between the extent of tau pathology and the degree of dementia in Alzheimer's disease (AD) patients, and mutations within the tau gene are known to cause forms of frontotemporal lobar degeneration (FTLD) (Khanna et al. Alzheimers Dement. 10 (2016), 1051-1065). Further disorders related to Tau—collectively referred to as neurodegenerative tauopathies—are for example, Pick's disease (PiD) and corticobasal degeneration (CBD).

[0005] Thus, CNS expression of therapeutic proteins that bind to tau or otherwise ameliorate the deleterious effects of tau neurofibrillary tangles would be desirable. There remains a need for CNS-targeted gene expression and vectors that are therapeutic to subjects suffering from tau-related disorders.

### 3. SUMMARY OF THE INVENTION

[0006] Provided are embodiments as characterized in the claims, disclosed in the description and illustrated in the Examples and Figures further below. Thus, the present disclosure relates to expression of Tau-specific human-derived monoclonal antibodies in an expression cassette delivered by a viral vector. Tau-specific antibodies include Tau-binding fragments thereof, as well as synthetic variants and biotechnological derivatives of the antibodies exemplified herein (e.g., comprising the antigen binding domain of the Tau-specific human derived monoclonal antibodies described herein, including as depicted in FIG. 1A), that recognize the Tau protein, including pathologically hyperphosphorylated forms of Tau. The Tau specific human derived monoclonal antibodies expressed by the expression cassettes may bind pathological hyperphosphorylated Tau filaments in dystrophic neurites, neurofibrillary tangles and neuropil threads in an immunohistochemical (IHC) assay with brain tissue of patients with Alzheimer's Disease (AD), Progressive supranuclear palsy (PSP) and/or Pick's Disease (PiD); and/or capture Tau and AD-associated Tau in an immunoprecipitation (IP) assay with brain extracts of synthetic phosphorylated peptide Tau pS202/pT205 or Tau pT212/pS214 using assays disclosed herein; and/or recognizes an epitope comprising the amino acid sequence 217-TPPTREPKKVA-227 (SEQ ID NO: 120) and 249-PMPDLKN-255 (SEQ ID NO: 121) or the phosphorylated Tau peptide pS202/pT205 having the amino acid sequence SGYSSPG(pS)PG(pT)PGSRSRT (SEQ ID NO: 122) or the phosphorylated Tau peptide pT212/pS214 having the amino acid sequence GTPGSRSR(pT)P(pS)LPTPPTR (SEQ ID NO: 123).

[0007] Provided are nucleic acid expression cassettes that comprise transgenes which encode the Tau-specific human-derived monoclonal antibodies, which transgenes are operably linked to one or more regulatory sequences that control expression of the transgene in human CNS tissue or in liver cells. The Tau-specific human derived monoclonal antibodies comprise, in embodiments, the CDRs of the heavy and light chain variable domains of NI-502.4P3, NI-502.31B6, or NI-502.8H1 or variants thereof interspersed with framework regions, or the heavy and light chain variable domains of NI-502.4P3, NI-502.31B6, or NI-502.8H1 (see Table 2 for amino acid sequences), as encoded, for example, by nucleotide sequences provided in Table 1, or variants thereof. In certain embodiments, the CDRs of the heavy and light chain variable domain of the Tau-specific human derived monoclonal antibodies NI-502.4P3, NI-502.31B6, or NI-502.8H1 comprise or consist of the amino acid sequences provided in Table 3 and are interspersed with framework regions. In certain embodiments, the nucleic acid expression cassette comprises a transgene which encodes an anti-Tau mAb or antigen-binding fragment thereof or a recombinant form incorporating an antigen-binding domain thereof, wherein the an anti-Tau mAb or antigen-binding fragment thereof or a recombinant form incorporating an antigen-binding domain thereof recognizes an epitope comprising the amino acid sequence 217-TPPTREPKKVA-227 (SEQ ID NO: 120) and 249-PMPDLKN-255 (SEQ ID NO: 121) or the phosphorylated Tau peptide pS202/pT205 having the amino acid sequence SGYSSPG(pS)PG(pT)PGSRSRT (SEQ ID NO: 122) or the phosphorylated Tau peptide pT212/pS214 having the amino acid sequence GTPGSRSR(pT)P(pS)LPTPPTR (SEQ ID NO: 123).

[0008] In an aspect, the Tau-specific human derived monoclonal antibodies encoded by the transgenes are full length antibodies, having a heavy chain with VH, C_{H}1, CH2, and CH3 domains and a light chain with VL and CL domains (see Table 2 for amino acid sequences for the VH and VL domains). In embodiments, the Tau-specific human derived monoclonal antibodies encoded by the transgenes disclosed herein comprise VH and VL domains having CDR1, CDR2 and CDR3 of the heavy chain and CDR1, CDR2, and CDR3 of the light chain of NI-502.4P3, NI-502.31B6, and NI-502.8H1 antibodies (see Table 3 for the amino acid sequences of CDRs) interspersed with human framework regions, and heavy chain constant domains (C_{H}1, CH2 and CH3) and light chain constant domains (CL) (see Table 6 for amino acid sequences of constant domains).

[0009] In other aspects, the Tau-specific human derived monoclonal antibody is an antigen binding fragment, including a Fab fragment, a F(ab′) fragment, or a F(ab′)₂ fragment. See for example, the expression cassette depicted in FIG. 1B. In embodiments, the antigen binding fragment comprises or consists of a heavy and light chain variable domain or variable domain comprising the heavy and light chain CDRs (interspersed in human framework regions) of one of the Tau-specific human derived monoclonal antibodies NI-502.4P3, NI-502.31B6, and NI-502.8H1 (see Table 2 and, for example, the CDR amino acid sequences of Table 3) and a C_{H}1 domain (in certain embodiments having no hinge sequence or including all or a portion of the hinge) in the heavy chain and a CL domain in the light chain (see Table 6 for constant domain sequences). In specific embodiments, the anti-Tau antibody comprises heavy and light chain CDRs (interspersed in human framework regions) of one of the Tau-specific human derived monoclonal antibodies NI-502.4P3, NI-502.31B6, and NI-502.8H1 comprise amino acid sequences provided in Table 3. In specific embodiments, the anti-Tau Fab comprises heavy and light chain CDRs (interspersed in human framework regions) of one of the Tau-specific human derived monoclonal antibodies NI-502.4P3, NI-502.31B6, and NI-502.8H1 and, in specific embodiments, comprise amino acid sequences of Fab fragment heavy and light chains as provided in Table 2 and 11G.

[0010] In aspects, the expression cassette encodes heavy chains and light chains with either an IRES or self cleaving linker, such as a Furin 2A linker, between the nucleotide sequences coding for the heavy chains and light chains, such that the heavy and light chains are expressed from the expression cassette as two separate polypeptides.

[0011] In other aspects, the expression cassettes encode recombinant forms incorporating an antigen-binding domain of a Tau-specific human derived monoclonal antibody, which include forms having a heavy chain variable domain and a light chain variable domain, for example, of NI-502.4P3, NI-502.31B6, and NI-502.8H1 antibodies (see Table 2 for amino acid sequences for the VH and VL domains and Table 3 for amino acid sequences of the CDR1, CDR2 and CDR3 of the heavy chain and CDR1, CDR2, and CDR3 of the light chain of NI-502.4P3, NI-502.31B6, and NI-502.8H1 antibodies) fused by a peptide bond, including linked by a flexible, non-cleavable linker, such as an scFv, a minibody, a diabody, or an ScFv-Fc. See, for example, the expression cassettes depicted in FIGS. 1B and 1C. The amino acid sequences of exemplary scFvs are provided in Table 11C, as encoded by nucleotide sequences for the components provided in Table 11D. The disclosed recombinant forms may further comprise an Fc domain or a CH3 domain (see Table 6 for amino acid sequences of Fc domains and CH3 domains) linked to the VH or VL by a hinge/linker sequence (see Table 11A). Amino acid sequences of exemplary scFv-Fcs are provided in Table 11B, as encoded by nucleotide sequences provided in Table 11E and 11F. Nucleotide sequences that encode exemplary Fabs are provided in Table 11G.

[0012] The expression cassettes disclosed herein encode heavy and light chains of the Tau-specific human derived monoclonal antibodies each having a signal or leader sequence at the N terminus appropriate for expression and secretion in human cells, particularly human CNS cells or liver cells. The single chain recombinant forms of the Tau-specific human derived monoclonal antibodies have a signal or leader sequence at the N terminus appropriate for expression and secretion in human cells, particularly human CNS cells or liver cells. Table 9 discloses signal or leader sequences that may be used in the disclosed constructs. In the expression cassettes, regulatory sequences are operably linked to the nucleotide sequences encoding the Tau-specific human derived monoclonal antibody. Such regulatory sequences include promoters, enhancers, introns, polyadenylation sequences, for example, as provided in Table 8.

[0013] Provided are artificial genomes comprising the expression cassettes described herein, which comprise AAV inverted terminal repeats flanking the expression cassette, in certain embodiments AAV2 ITRs.

[0014] In other aspects, provided are recombinant vectors, particularly, recombinant adeno-associated viruses (AAVs) comprising these artificial genomes.

[0015] In another aspect, provided are recombinant AAV vectors comprising transgenes encoding a Tau specific human antibody or antigen-binding fragment or recombinant form incorporating an antigen binding domain that binds the determined epitopes (disclosed in Table 4), that is, wherein the antigen-binding fragment or domain recognizes an epitope comprising the amino acid sequence 217-TPPTREPKKVA-227 (SEQ ID NO: 120) and 249-PMPDLKN-255 (SEQ ID NO: 121) or the phosphorylated Tau peptide pS202/pT205 having the amino acid sequence SGYSSPG(pS)PG(pT)PGSRSRT (SEQ ID NO: 122) or the phosphorylated Tau peptide pT212/pS214 having the amino acid sequence GTPGSRSR(pT)P(pS)LPTPPTR (SEQ ID NO: 123).

[0016] In another aspect, a method of treatment by delivery of an rAAV comprising an antibody (including antigen binding fragment and forms)-encoding nucleic acid expression cassette described herein are also provided. A method for treating a disease or disorder in a subject in need thereof comprising the administration of recombinant AAV particles comprising an expression cassette encoding Tau-specific human antibodies or antibody-binding fragments or variants thereof is provided.

[0017] Methods of producing the rAAVs, host cells for production of rAAVs and rAAVs produced by the methods are disclosed herein.

[0018] The embodiments disclosed herein are illustrated by way of examples infra describing the construction and function of gene cassettes engineered with antibodies and antigen-binding fragments thereof operably linked to regulatory elements designed for expression of the antibodies at Tau-associates sites of pathology, for example, but not limited to, the CNS.

### 3.1. Embodiments

[0019] 1. A nucleic acid expression cassette, wherein the expression cassette comprises a transgene encoding a full-length or substantially full-length anti-Tau protein (anti-Tau) mAb or an antigen-binding fragment thereof, or a recombinant form incorporating an antigen-binding domain thereof, which
[0020] (i) binds pathological hyperphosphorylated Tau filaments in dystrophic neurites, neurofibrillary tangles and neuropil threads in an immunohistochemical (IHC) assay with brain tissue of patients with Alzheimer's Disease (AD), Progressive supranuclear palsy (PSP) and/or Pick's Disease (PiD); and/or (ii) captures Tau and AD-associated Tau in an immunoprecipitation (IP) assay with brain extracts of patients with AD;
[0021] wherein said transgene is operably linked to one or more regulatory sequences that promote expression of the transgene in human CNS tissue or liver cells.

[0022] 2. The nucleic acid expression cassette of embodiment 1, wherein said anti-Tau protein mAb or antigen binding fragment thereof or recombinant form incorporating an antigen-binding domain thereof has an EC₅₀ of about 15 nM for Tau or of about 2 nM for the synthetic phosphorylated peptide Tau pS202/pT205 or Tau pT212/pS214.

[0023] 3. The nucleic acid expression cassette of either of embodiment 1 or 2, which anti-Tau protein mAb or antigen binding fragment thereof or recombinant form incorporating an antigen-binding domain thereof, comprises a variable heavy (VH) chain domain comprising VH complementary determining regions (CDRs) 1, 2, and 3, and a variable light (VL) chain domain comprising VL CDRs 1, 2, and 3, optionally, wherein
[0024] (a) VH-CDR1 comprises the amino acid sequence of SEQ ID NO: 154 or a variant thereof, wherein the variant comprises one or two amino acid substitutions,
[0025] (b) VH-CDR2 comprises the amino acid sequence of SEQ ID NO: 155 or a variant thereof, wherein the variant comprises one or two amino acid substitutions,
[0026] (c) VH-CDR3 comprises the amino acid sequence of SEQ ID NO: 156 or a variant thereof, wherein the variant comprises one or two amino acid substitutions,
[0027] (d) VL-CDR1 comprises the amino acid sequence of SEQ ID NO: 157 or a variant thereof, wherein the variant comprises one or two amino acid substitutions,
[0028] (e) VL-CDR2 comprises the amino acid sequence of SEQ ID NO: 158 or a variant thereof, wherein the variant comprises one or two amino acid substitutions, and
[0029] (f) VL-CDR3 comprises the amino acid sequence of SEQ ID NO: 159 or a variant thereof, wherein the variant comprises one or two amino acid substitutions; or wherein
[0030] (g) VH-CDR1 comprises the amino acid sequence of SEQ ID NO: 160 or a variant thereof, wherein the variant comprises one or two amino acid substitutions,
[0031] (h) VH-CDR2 comprises the amino acid sequence of SEQ ID NO: 161 or a variant thereof, wherein the variant comprises one or two amino acid substitutions,
[0032] (i) VH-CDR3 comprises the amino acid sequence of SEQ ID NO: 162 or a variant thereof, wherein the variant comprises one or two amino acid substitutions,
[0033] (j) VL-CDR1 comprises the amino acid sequence of SEQ ID NO: 163 or a variant thereof, wherein the variant comprises one or two amino acid substitutions,
[0034] (k) VL-CDR2 comprises the amino acid sequence of SEQ ID NO: 164 or a variant thereof, wherein the variant comprises one or two amino acid substitutions, and
[0035] (l) VL-CDR3 comprises the amino acid sequence of SEQ ID NO: 165 or a variant thereof, wherein the variant comprises one or two amino acid substitutions; or wherein
[0036] (m) VH-CDR1 comprises the amino acid sequence of SEQ ID NO: 166 or a variant thereof, wherein the variant comprises one or two amino acid substitutions,
[0037] (n) VH-CDR2 comprises the amino acid sequence of SEQ ID NO: 167 or a variant thereof, wherein the variant comprises one or two amino acid substitutions,
[0038] (o) VH-CDR3 comprises the amino acid sequence of SEQ ID NO: 168 or a variant thereof, wherein the variant comprises one or two amino acid substitutions,
[0039] (p) VL-CDR1 comprises the amino acid sequence of SEQ ID NO: 169 or a variant thereof, wherein the variant comprises one or two amino acid substitutions,
[0040] (q) VL-CDR2 comprises the amino acid sequence of SEQ ID NO: 170 or a variant thereof, wherein the variant comprises one or two amino acid substitutions, and
[0041] (r) VL-CDR3 comprises the amino acid sequence of SEQ ID NO: 171 or a variant thereof, wherein the variant comprises one or two amino acid substitutions.

[0042] 4. The nucleic acid expression cassette of any of embodiments 1 to 3, wherein the anti-Tau mAb or antigen-binding fragment thereof or recombinant form incorporating an antigen-binding domain thereof recognizes an epitope comprising the amino acid sequence 217-TPPTREPKKVA-227 (SEQ ID NO: 120) and 249-PMPDLKN-255 (SEQ ID NO: 121) or the phosphorylated Tau peptide pS202/pT205 having the amino acid sequence SGYSSPG(pS)PG(pT)PGSRSRT (SEQ ID NO: 122) or the phosphorylated Tau peptide pT212/pS214 having the amino acid sequence GTPGSRSR(pT)P(pS)LPTPPTR (SEQ ID NO: 123).

[0043] 5. The nucleic acid expression cassette of any of embodiments 1 to 4, wherein the VH domain comprises an amino acid sequence of SEQ ID NO: 97 or a variant thereof having at least 90% sequence identity to the amino acid sequence of SEQ ID NO: 97 and the VL domain comprises an amino acid sequence of SEQ ID NO: 98 or a variant thereof having at least 90% sequence identity to the amino acid sequence of SEQ ID NO: 98; or the VH domain comprises an amino acid sequence of SEQ ID NO: 99 or a variant thereof having at least 90% sequence identity to the amino acid sequence of SEQ ID NO: 99 and the VL domain comprises an amino acid sequence of SEQ ID NO: 100 or a variant thereof having at least 90% sequence identity to the amino acid sequence of SEQ ID NO: 100; or the VH domain comprises an amino acid sequence of SEQ ID NO: 101 or a variant thereof having at least 90% sequence identity to the amino acid sequence of SEQ ID NO: 101 and the VL domain comprises an amino acid sequence of SEQ ID NO: 102 or a variant thereof having at least 90% sequence identity to the amino acid sequence of SEQ ID NO: 102.

[0044] 6. The nucleic acid expression cassette of any of embodiments 1 to 5, wherein the nucleotide sequence encoding the VH domain comprises SEQ ID NO: 1 or a variant thereof having at least 90% sequence identity to the nucleotide sequence of SEQ ID NO: 1 and the nucleotide sequence encoding the VL domain comprises SEQ ID NO: 2 or a variant thereof having at least 90% sequence identity to the nucleotide sequence of SEQ ID NO: 2; or the nucleotide sequence encoding the VH domain comprises SEQ ID NO: 3 or a variant thereof having at least 90% sequence identity to the nucleotide sequence of SEQ ID NO: 3 and the nucleotide sequence encoding the VL domain comprises SEQ ID NO: 4 or a variant thereof having at least 90% sequence identity to the nucleotide sequence of SEQ ID NO: 4; or the nucleotide sequence encoding the VH domain comprises SEQ ID NO: 5 or a variant thereof having at least 90% sequence identity to the nucleotide sequence of SEQ ID NO: 5 and the nucleotide sequence encoding the VL domain comprises SEQ ID NO: 6 or a variant thereof having at least 90% sequence identity to the nucleotide sequence of SEQ ID NO: 6.

[0045] 7. The nucleic acid expression cassette of any of embodiments 1 to 6, wherein the anti-Tau antigen binding fragment is a Fab fragment, a F(ab′) fragment, or a F(ab′)₂ fragment.

[0046] 8. The nucleic acid expression cassette of any of embodiments 1 to 7, wherein the anti-Tau mAb or antigen-binding fragment thereof comprises a heavy chain comprising or consisting of the VH domain and a C_{H}1 domain comprising or consisting of an amino acid sequence of SEQ ID NO: 193 (IgG1), 194 (IgG2), or 195 (IgG4), and comprising a light chain comprising or consisting of the VL domain and a light chain constant region comprising an amino acid sequence of SEQ ID NO: 116 or 118.

[0047] 9. The nucleic acid expression cassette of embodiment 8, wherein the heavy chain comprises or consists of an amino acid sequence of SEQ ID NO: 351 (IgG1), 352 (IgG2), or 353, (IgG4) and the light chain comprises an amino acid sequence of SEQ ID NO: 188 or 366, or wherein the heavy chain comprises or consists of an amino acid sequence of SEQ ID NO: 356 (IgG1), 357 (IgG2), or 358 (IgG4) and the light chain comprises an amino acid sequence of SEQ ID NO: 190 or 367, or wherein the heavy chain comprises or consists of an amino acid sequence of SEQ ID NO: 361 (IgG1), 362 (IgG2), or 363 (IgG4) and the light chain comprises an amino acid sequence of SEQ ID NO: 192 or 368.

[0048] 10. The nucleic acid expression cassette of any of embodiments 1 to 7, wherein the anti-Tau mAb or antigen-binding fragment thereof comprises a heavy chain comprising or consisting of the VH domain and a C_{H}1 domain comprising or consisting of an amino acid sequence of SEQ ID NO: 193 (IgG1), 194 (IgG2), or 195 (IgG4) and part or all of the hinge region comprising or consisting of an amino acid sequence of SEQ ID NOs: 172-186 or 202-216 (Table 7), and comprising a light chain comprising a light chain constant region comprising an amino acid sequence of SEQ ID NO: 116 or 118.

[0049] 11. The nucleic acid expression cassette of embodiment 10, wherein the heavy chain comprises or consists of an amino acid sequence of SEQ ID NO: 187 (IgG1), 354 (IgG2), or 355 (IgG4) and the light chain comprises an amino acid sequence of SEQ ID NO: 188 or 366, or wherein the heavy chain comprises or consists of an amino acid sequence of SEQ ID NO: 189 (IgG1), 359 (IgG2), or 360 (IgG4) and the light chain comprises an amino acid sequence of SEQ ID NO: 190 or 367, or wherein the heavy chain comprises or consists of an amino acid sequence of SEQ ID NO: 191 (IgG1), 364 (IgG2), or 365 (IgG4) and the light chain comprises an amino acid sequence of SEQ ID NO: 192 or 368.

[0050] 12. The nucleic acid expression cassette of any of embodiments 1 to 6, wherein the anti-Tau mAb is a full length or substantially full length mAb.

[0051] 13. The nucleic acid expression cassette of embodiment 12, wherein the anti-Tau mAb comprises a heavy chain constant region comprising an amino acid sequence of SEQ ID NO: 103, 105, or 107.

[0052] 14. The nucleic acid expression cassette of embodiment 12 or 13, wherein the anti-Tau mAb comprises a heavy chain constant region which has one or more amino acid substitutions that reduce binding of the constant region to an FcγR or increase serum half-life.

[0053] 15. The nucleic acid expression cassette of embodiment 14, wherein the heavy chain constant region comprises an amino acid sequence of SEQ ID NO: 109 or 110.

[0054] 16. The nucleic acid expression cassette of any of embodiments 1 to 15 wherein the light chain comprises a light chain constant region of SEQ ID NO: 116 or 118.

[0055] 17. The nucleic acid expression cassette of any of the embodiments 1 to 16, wherein the transgene comprises a VH domain amino acid sequence and a VL domain amino acid sequence that each have a signal sequence at the N-terminus, wherein the signal sequence is appropriate for expression and secretion in human cells.

[0056] 18. The nucleic acid expression cassette of embodiment 17, wherein the signal sequence is appropriate for expression and secretion in human CNS tissue.

[0057] 19. The nucleic acid expression cassette of embodiments 17 or 18, wherein said signal sequence is MYRMQLLLLIALSLALVTNS (SEQ ID NO: 87) or a signal sequence listed in Table 9.

[0058] 20. The nucleic acid expression cassette of any of the embodiments of 1 to 19, wherein a nucleotide sequence encoding a furin 2A linker is in between the nucleotide sequence encoding the heavy chain and the nucleotide sequence encoding the light chain sequences, resulting in a construct with the structure: Leader—Heavy chain—Furin site—2A site—Leader—Light chain—PolyA.

[0059] 21. The nucleic acid expression cassette of embodiment 20, wherein said furin 2A linker is RKRR(GSG)APVKQTLNFDLLKLAGDVESNPGP (SEQ ID NO: 138).

[0060] 22. The nucleic acid expression cassette of any of the embodiments of 1 to 21, wherein the transgene comprises a nucleotide sequence encoding the heavy and light chain variable domains of an anti-Tau Fab fragment of Table 11G or the nucleic acid expression cassette has the nucleotide sequence of SEQ ID NO: 378, 384 or 390.

[0061] 23. The nucleic acid expression cassette of embodiments 1 to 6, wherein the recombinant form incorporating an antigen-binding domain comprises the VH domain and the VL domain linked via a flexible, non-cleavable linker.

[0062] 24. The nucleic acid expression cassette of embodiment 23 wherein the recombinant form incorporating the antigen-binding domain is an scFv, a minibody, a diabody or an scFv-Fc.

[0063] 25. The nucleic acid expression cassette of either of embodiments 23 or 24, wherein the recombinant form incorporating the antigen-binding domain is an scFv and has an amino acid sequence of one of SEQ ID Nos: 297 to 305.

[0064] 26. The nucleic acid expression cassette of any of embodiments 23 to 25, wherein the recombinant form incorporating the antigen-binding domain comprises an Fc domain or a CH3 domain fused to the VH or VL domain by a hinge/linker peptide.

[0065] 27. The nucleic acid expression cassette of embodiment 26, wherein the hinge/linker peptide comprises an amino acid sequence of SEQ ID NO: 226 to 231.

[0066] 28. The nucleic acid expression cassette of embodiment 26 or 27, wherein the recombinant form incorporating the antigen-binding domain comprises an Fc domain having an amino acid sequence of SEQ ID NO: 196, 197, or 198, or a CH3 domain having an amino acid sequence of SEQ ID NO: 199, 200, or 201.

[0067] 29. The nucleic acid expression cassette of any of embodiments 26 to 28, wherein the recombinant form incorporating the antigen-binding domain comprises an amino acid sequence from Table 1 IF or of one of SEQ ID NOs: 234 to 296.

[0068] 30. The nucleic acid expression cassette of embodiment 29 which comprises a nucleotide sequence of one of SEQ ID NOs: 317 to 340 or 345 to 350 or from Table 1 IF.

[0069] 31. The nucleic acid expression cassette of embodiment 23, wherein two recombinant forms incorporating the antigen-binding domain are placed in tandem connected by a peptide linker.

[0070] 32. The nucleic acid expression cassette of any of embodiments 23 to 31, wherein the recombinant form has a signal sequence at the N-terminus appropriate for expression and secretion in human cells.

[0071] 33. The nucleic acid expression cassette of embodiment 32, wherein the signal or leader sequence is appropriate for expression and secretion in human CNS tissue.

[0072] 34. The nucleic acid expression cassette of embodiment 32, wherein said signal sequence is MYRMQLLLLIALSLALVTNS (SEQ ID NO: 87) or a signal sequence listed in Table 9.

[0073] 35. The nucleic acid expression cassette of any of embodiments 1 to 34, wherein the nucleic acid sequence encoding the anti-Tau mAb is codon optimized.

[0074] 36. The nucleic acid expression cassette of any of embodiments 1 to 35, further comprising:
[0075] (1) AAV inverted terminal repeats that flank the expression cassette; and
[0076] (2) one or more regulatory control elements operably linked to the transgene, which regulatory control elements include a) a promoter, b) optionally an intron and c) a poly A signal.

[0077] 37. The nucleic acid expression cassette of any of embodiments 1 to 36, which comprises a nucleotide sequence of SEQ ID NO: 7, 8, 9, 10, 11, 12, 13, 14 or 15 or in Table 11E, 11F or 11G.

[0078] 38. The nucleic acid expression cassette of any of embodiments 1 to 37 which comprises regulatory element which is a constitutive promoter or a tissue specific promoter that directs expression of the transgene.

[0079] 39. The nucleic acid expression cassette of embodiment 38 wherein said regulatory element is a CAG promoter, a CMV promoter, a Syn promoter, a GFAP promoter, a Mecp2 promoter, a hexaribonucleotide binding protein-3 (NeuN) promoter or a Cα2+/calmodulin-dependent protein kinase II (CamKII) promoter.

[0080] 40. A recombinant viral vector comprising the nucleic acid expression cassette of any of embodiments 1 to 39.

[0081] 41. The recombinant viral vector of embodiment 40 which is an adeno-associated virus (AAV) virus-based vector.

[0082] 42. A recombinant viral vector, which comprises:
[0083] (a) a viral capsid that is at least 95% identical to the amino acid sequence of an AAV8 capsid (SEQ ID NO: 131), AAV9 capsid (SEQ ID NO: 132), AAVrh10 capsid (SEQ ID NO: 133), an AAV.PHP.B capsid (SEQ ID NO: 220), an AAV.PHP.eB capsid (SEQ ID NO: 219), an AAVrh20 capsid (SEQ ID NO: 134), an AAVrh39 capsid (SEQ ID NO: 341) or an AAVcy5 capsid; and
[0084] (b) an artificial genome comprising the expression cassette of any of embodiments 1 to 39.

[0085] 43. The viral vector of embodiment 42, wherein the AAV capsid is AAV8 (SEQ ID NO: 132) or AAV9 (SEQ ID NO: 133).

[0086] 44. The viral vector of embodiments 40 to 43, wherein the ITR sequences are derived from AAV2.

[0087] 45. A pharmaceutical composition for use in the prophylactic or therapeutic treatment of a neurodegenerative tauopathy, Alzheimer's Disease (AD), Progressive supranuclear palsy (PSP) or Pick's Disease (PiD), in a human subject in need thereof, comprising an AAV vector having:
[0088] (a) a viral capsid that is at least 95% identical to the amino acid sequence of an AAV8 capsid (SEQ ID NO: 131), an AAV9 capsid (SEQ ID NO: 132), an AAV.PHP.B capsid (SEQ ID NO: 220), an AAV.PHP.eB capsid (SEQ ID NO: 219), AAVrh10 capsid (SEQ ID NO: 133), an AAVrh20 capsid (SEQ ID NO: 134), an AAVrh39 capsid (SEQ ID NO: 341) or an AAVcy5 capsid; and
[0089] (b) an artificial genome comprising a nucleic acid expression cassette of any of embodiments 1 to 39 flanked by AAV inverted terminal repeats (ITRs), wherein said AAV vector is formulated for administration to the subject, optionally wherein administration is intrathecal, intravenous, subcutaneous, intranasal, or intramuscular or to the cisterna magna.

[0090] 46. A method for prophylactic or therapeutic treatment of a neurodegenerative tauopathy, Alzheimer's Disease (AD), Progressive supranuclear palsy (PSP) or Pick's Disease (PiD), in a human subject in need thereof, comprising delivering to the CNS of said human subject, a therapeutically effective amount of a substantially full-length or full-length anti-Tau mAb, or antigen-binding fragment thereof, or a recombinant form incorporating an antigen-binding domain thereof expressed from a nucleic acid expression cassette of any of embodiments 1 to 39 and produced by human CNS cells.

[0091] 47. A method for prophylactic or therapeutic treatment of a neurodegenerative tauopathy, Alzheimer's Disease (AD), Progressive supranuclear palsy (PSP) and/or Pick's Disease (PiD), in a human subject in need thereof, comprising: administering to said subject a therapeutically effective amount of the recombinant viral vector of embodiments 40 to 44 or the pharmaceutical composition of embodiment 45.

[0092] 48. The pharmaceutical composition or method for prophylactic or therapeutic treatment of a neurodegenerative tauopathy of any of embodiments 45 to 47, wherein the neurodegenerative tauopathy is selected from the group consisting of Alzheimer's disease, amyotrophic lateral sclerosis/parkinsonism-dementia complex, argyrophilic grain dementia, British type amyloid angiopathy, cerebral amyloid angiopathy, corticobasal degeneration, Creutzfeldt-Jakob disease, dementia pugilistica, diffuse neurofibrillary tangles with calcification, Down's syndrome, frontotemporal dementia, frontotemporal dementia with parkinsonism linked to chromosome 17, frontotemporal lobar degeneration, Gerstmann-Straussler-Scheinker disease, Hallervorden-Spatz disease, inclusion body myositis, multiple system atrophy, myotonic dystrophy, Niemann-Pick disease type C, non-Guamanian motor neuron disease with neurofibrillary tangles, Pick's disease, postencephalitic parkinsonism, prion protein cerebral amyloid angiopathy, progressive subcortical gliosis, progressive supranuclear palsy, subacute sclerosing panencephalitis, Tangle only dementia, multi-infarct dementia and ischemic stroke.

[0093] 49. The composition or method of any of embodiments 45 to 48, wherein the recombinant viral vector is administered intravenously, intrathecally, ICV or via the cisterna magna.

[0094] 50. The composition or method of any of embodiments 45 to 49, wherein the mAb or antigen-binding fragment thereof is a hyperglycosylated mutant or wherein the Fc polypeptide of the mAb is glycosylated or aglycosylated.

[0095] 51. The composition or method of embodiments 45 to 50 wherein the mAb or antigen-binding fragment thereof contains an alpha 2,6-sialylated glycan.

[0096] 52. The composition or method of any of embodiments 45 to 50 wherein the mAb or antigen-binding fragment thereof is glycosylated but does not contain detectable NeuGc and/or α-Gal.

[0097] 53. The composition or method of any of embodiments 45 to 50 wherein the mAb or antigen-binding fragment thereof contains a tyrosine sulfation.

[0098] 54. A method of producing recombinant AAVs comprising:
[0099] (a) culturing a host cell containing:
   [0100] (i) an artificial genome comprising a cis expression cassette of any of embodiments 1 to 39 flanked by AAV ITRs
   [0101] (ii) a trans expression cassette lacking AAV ITRs, wherein the trans expression cassette encodes an AAV rep and an AAV capsid protein operably linked to expression control elements that drive expression of the AAV rep and the AAV capsid protein in the host cell in culture and supply the AAV rep and the AAV capsid protein in trans;
   [0102] (iii) sufficient adenovirus helper functions to permit replication and packaging of the artificial genome by the AAV capsid protein; and
[0103] (b) recovering recombinant AAV encapsidating the artificial genome from the cell culture.

[0104] 55. The method of embodiment 54, wherein the transgene encodes a substantially full-length or full-length mAb or antigen binding fragment or a variant thereof that comprises the heavy and light chain variable domains of NI-502.4P3, NI-502.31B6, or NI-502.8H1.

[0105] 56. The method of embodiment 54 or 55, wherein the AAV capsid protein is an AAV9 (SEQ ID NO: 131), AAV.PHP.B (SEQ ID NO: 220), AAV.PHP.eB (SEQ ID NO: 219), AAVrh10 (SEQ ID NO: 132), AAVrh20 (SEQ ID NO: 133), AAVrh39 (SEQ ID NO: 341), or AAVcy5 capsid protein.

[0106] 57. The method of embodiment 54 to 56, wherein the transgene encodes a substantially full-length or full-length mAb, a single chain Fv fragment (scFv), a F(ab′) fragment, a F(ab) fragment, a F(ab′)₂ fragment, an scFv-Fc, a minibody, or a diabody.

[0107] 58. A DNA molecule comprising the expression cassette of any one of embodiments 1 to 39.

[0108] 59. The DNA molecule of embodiment 58 which is a plasmid.

[0109] 60. A host cell comprising the DNA molecule of embodiment 58 or 59.

[0110] 61. A host cell containing a nucleic acid comprising the expression cassette of any of embodiments 1 to 39 flanked by AAV ITRs.

[0111] 62. A host cell comprising the DNA molecule of embodiment 58 or 59.

[0112] 63. The host cell of embodiment 62 further containing a second nucleic acid comprising a trans expression cassette lacking AAV ITRs, wherein the trans expression cassette encodes an AAV rep and an AAV capsid protein operably linked to expression control elements that drive expression of the AAV rep and the AAV capsid protein in the host cell in culture and supply the AAV rep and the AAV capsid protein in trans.

[0113] 64. A recombinant AAV produced by the method comprising:
[0114] (a) culturing a host cell containing:
   [0115] (i) an artificial genome comprising a cis expression cassette of any of embodiments 1 to 39 flanked by AAV ITRs
   [0116] (ii) a trans expression cassette lacking AAV ITRs, wherein the trans expression cassette encodes an AAV rep and an AAV capsid protein operably linked to expression control elements that drive expression of the AAV rep and the AAV capsid protein in the host cell in culture and supply the AAV rep and the AAV capsid protein in trans;
   [0117] (iii) sufficient adenovirus helper functions to permit replication and packaging of the artificial genome by the AAV capsid protein; and
[0118] (b) recovering recombinant AAV encapsidating the artificial genome from the cell culture.

[0119] 65. The recombinant AAV of embodiment 64, wherein the transgene encodes a substantially full-length or full-length mAb or antigen binding fragment or a variant thereof that comprises the heavy and light chain variable domains of NI-502.4P3, NI-502.31B6, or NI-502.8H1.

### 4. BRIEF DESCRIPTION OF THE FIGURES

[0120] FIGS. 1A-1F illustrate various molecular strategies for constructing gene therapy vectors. FIG. 1A illustrates various molecular formats containing therapeutic antigen-binding fragments, for example anti-Tau-binding fragments. FIG. 1B depicts schematics illustrating the construction of various rAAV vector genome (transgene) constructs, e.g. a vectorized Fab construct, a vectorized (full-length)IgG construct and a vectorized ScFv-Fc construct, containing an expression cassette encoding the heavy and light chains of the therapeutic mAb controlled by expression elements, and flanked by AAV ITRs. FIG. 1C depicts schematics illustrating the construction of further rAAV vector genome (transgene) constructs, e.g. a vectorized Minibody construct, a vectorized ScFv construct and a vectorized Diabody construct, containing an expression cassette encoding the heavy and light chains of the therapeutic mAb in various arrangements, including optional linkers, wherein transcription of the encoded mAbs are controlled by expression elements, and flanked by AAV ITRs. FIG. 1D provides the amino acid sequence of an exemplary transgene construct of the 4P3 antibody, such that the components are arranged to express a 4P3 Fab or IgG transgene. Various glycosylation and/or sulfation sites are depicted, illustrating that expression of the antibody transgene in human cells undergoes post-translational modification. FIG. 1E provides the amino acid sequence of an exemplary transgene construct of the 31B6 antibody, such that the components are arranged to express a 31B6 Fab or IgG transgene. Various glycosylation and/or sulfation sites are depicted, illustrating that expression of the antibody transgene in human cells undergoes post-translational modification. FIG. 1F provides the amino acid sequence of an exemplary transgene construct of the 8H1 antibody, such that the components are arranged to express a 8H1 Fab or IgG transgene. Various glycosylation and/or sulfation sites are depicted, illustrating that expression of the antibody transgene in human cells undergoes post-translational modification.

[0121] FIG. 2 (panels 1 to 5) depicts a Clustal Multiple Sequence Alignment of AAV capsids 1-9, rh.10, rh.20, rh.39, rh.74 (v1 and v2) and hu.37. The amino acid sequences of the AAV capsids are assigned SEQ ID NOs as follows: AAV1 is SEQ ID NO: 124; AAV2 is SEQ ID NO: 125; AAV3 is SEQ ID NO: 126; AAV4 is SEQ ID NO: 127; AAV5 is SEQ ID NO: 128; AAV6 is SEQ ID NO: 129; AAV7 is SEQ ID NO: 130; AAV8 is SEQ ID NO: 131; AAV9 is SEQ ID NO: 132; AAVrh.10 is SEQ ID NO: 133; AAVrh.20 is SEQ ID NO: 134; rh.74v1 is SEQ ID NO: 135; rh74.v2 is SEQ ID NO: 136; rh.39 is SEQ ID NO: 341 and hu.37 is SEQ ID NO: 137.

[0122] FIG. 3 depicts antibody protein expression in 293T cells as detected by Western Blot. Cells were transfected with cis plasmids each expressing the following antibodies: 43A11 IgG2a (isotype control mAb), 31B6 IgG2a (mAb 31B6 chimeric human/mouse, full-length), 4P3 IgG2a (mAb 4P3 chimeric human/mouse, full-length), 8H1 IgG2a (mAb 8H1 chimeric human/mouse, full-length), 31B6 IgG2a LALAPG (mAb 31B6 chimeric human/mouse, full-length having Fc mutations), 4P3 IgG2a LALAPG (mAb 4P3 chimeric human/mouse, full-length having Fc mutations), and 8H1 IgG2a LALAPG (mAb 8H1 chimeric human/mouse, full-length having Fc mutations). Note that mAb 43A11 (control), mAb 4P3, and mAb 8H1 contain a kappa light chain, and mAb 31B6 contains a lambda light chain.

[0123] FIGS. 4A and 4B depicts viral vector expression in 293T-AAVR cells transduced with Tau AGT vectors at 10e4 or 10e5 vector genome/cell. Supernatant was collected at 40 hours post-transduction and immunoblotted to confirm antibody expression. All antibodies were detected in supernatant. 43A11 (isotype control mAb with an IgG2a heavy chain constant domain), 31B6 (mAb 31B6 chimeric human/mouse, full-length, with a IgG2a heavy chain constant domain), 4P3 (mAb 4P3 chimeric human/mouse, full-length, with an IgG2a heavy chain constant domain), 8H1 IgG2a (mAb 8H1 chimeric human/mouse, full-length, with an IgG2a heavy chain constant domain), 31B6 LALAPG (mAb 31B6 chimeric human/mouse, full-length with an IgG2a heavy chain constant domain having Fc mutations), 4P3 LALAPG (mAb 4P3 chimeric human/mouse, full-length with an IgG2a heavy chain constant domain having Fc mutations having Fc mutations), and 8H1 IgG2a LALAPG (mAb 8H1 chimeric human/mouse, full-length with an IgG2a heavy chain constant domain having Fc mutations having Fc mutations). Note that mAb 43A11 (control), mAb 4P3, and mAb 8H1 contain a kappa light chain (A), and mAb 31B6 contains a lambda light chain (B).

[0124] FIG. 5 shows the results of antibody dose-dependent expression as detected in plasma following bilateral ICV administration of 4P3 IgG2a and 4P3 IgG2a LALAPG gene therapy vectors in P0/P1 pup mice at three different doses: 2.4e9 vg/side (low dose), 1.2e10 vg/side (mid dose), and 6e10 vg/side (high dose).

[0125] FIGS. 6A-6C. Antibody is detected following ICV administration of 4P3 IgG2a and 4P3 IgG2a LALAPG gene therapy vectors at three doses in various brain tissues (sandwich ELISA): cortex (A: Ab concentration in homogenate), hippocampus (B: Ab concentration in homogenate), and striatum (C: Ab concentration in homogenate), as depicted in the plots of antibody concentration (nM) quantitated in tissue homogenate and as a fraction of total protein (ng Ab per μg total protein).

[0126] FIG. 7. Antibody (4P3 IgG2a) levels (nM) detected in plasma following administration of AAV 4P3 IgG2a encoding gene therapy vector (mid dose level: 1.2e10 per side for total administration of 2.4e10) by intrahippocampal administration, intrastriatal administration or intraventricular administration to adult mice 4 weeks after dosing.

[0127] FIGS. 8A-8C: Antibody concentrations (ng Ab per μg total protein) determined by a sandwich ELISA mouse IgG2a capture assay in brain homogenates from mice 4 weeks after administration by intrahippocampal administration, intrastriatal administration, or intraventricular administration of the AAV 4P3 IgG2a encoding vector of cortex (A), hippocampus (B), and striatum (C)\.

[0128] FIGS. 9A-9C: Antibody concentrations (nM) determined by a sandwich ELISA mouse IgG2a capture assay in homogenates of cortex (A), hippocampus (B), and striatum (C) from C57BL/6 mice having been administered AAV9 vector controls or encoding anti-Tau vectored constructs described herein (see Table 15) bilaterally either intracerebroventricular (ICV) or, if indicated as “i.h.c”, intrahippocampal, at 4 weeks after administration.

[0129] FIGS. 10A-10C: Antibody concentrations (nM) determined by a sandwich ELISA mouse IgG2a capture assay in brain homogenates of cortex (A), hippocampus (B), and striatum (C) from C57BL/6 mice having been administered AAV9 vector controls or encoding anti-Tau vectored constructs described herein bilaterally either intrahippocampal or, if indicated as “icv”, intracerebroventricular, at 4 weeks after administration.

[0130] FIGS. 11A-11C: Antibody levels (pM) determined by a sandwich ELISA mouse IgG2a capture assay in brain homogenates of hippocampus (A), cortex (B) and striatum (C) from C57BL/6 mice having been administered AAV9 vector controls or encoding anti-Tau vectored constructs encoding the 4P3 IgG2a antibody under the control of the hSyn or GFAP promoters bilaterally intrahippocampally (1.2e10 vg/side) or 4P3 IgG2a antibody (as protein, not a gene therapy construct) intraperitoneally (i.p.) (30 mg/kg), each at 1 month and 3 months after administration (4P3 IgG2a antibody assessed only at one month).

[0131] FIGS. 12A-12C. Immunodepletion of seeding competent Tau from AD brain homogenate by anti-tau antibodies NI-502.4P3, NI-502.31B6 and NI-502.8H1. Tau aggregation in HEK293T Tau biosensor cells using AD brain homogenate from a selected donor that had been immunodepleted with increasing concentrations of NI-502.4P3 (A), NI-502.31B6 (B) or NI-502.8H1 (C) antibodies. The derived IC₅₀ values were 6.5, and 7.1 μg/mL, for donors NI-502.4P3 and NI-502.8H1, respectively. Due to the obtained curve fitting, no IC₅₀ value could be determined for NI-502.31B6. Data were fitted to a non-linear regression curve; each antibody concentration was tested in duplicate, error bars represent standard deviation. AD, Alzheimer's disease; FRET, fluorescence resonance energy transfer.

### 5. DETAILED DESCRIPTION

[0132] Provided, in part, are viral vectors and methods of treatment using vectors having transgenes encoding unique Tau-specific human-derived monoclonal antibodies and Tau-binding fragments thereof, as well as synthetic variants and biotechnological derivatives of the antibodies having the binding activity of the Tau-specific human-derived monoclonal antibodies. The invention thus provides viral vectors carrying the nucleotide sequences encoding antibodies and antigen-binding fragments thereof to the CNS, wherein the Tau-specific antibodies are expressed and bind pathological hyperphosphorylated Tau filaments in dystrophic neurites, neurofibrillary tangles and neuropil threads, as demonstrated in an immunohistochemical (IHC) assay with brain tissue of patients with Alzheimer's Disease (AD), Progressive supranuclear palsy (PSP) and/or Pick's Disease (PiD). The provided vectors deliver the antibodies by expression of transgenes by incorporating nucleotide sequences encoding the engineered antibodies, antigen-binding fragments or variants thereof described herein, into viral vectors, such as rAAVs, for use in therapy. The novel Tau-specific human-derived monoclonal antibody nucleic acids were engineered in expression cassettes including regulatory elements to provide antibody expression at the site of Tau-induced pathogenesis in order to re-stabilize microtubules or otherwise ameliorate the symptoms of pathogenic Tau. Ultimately, these viral vector designs may improve therapeutic efficacy by gene transfer of Tau-specific antibodies by providing stabile and persistent expression of the therapeutic product in the CNS.

### 5.1. Definitions

[0133] The term “viral vector” refers to a replication defective viral particle containing a nucleic acid transgene, in certain instances, a Tau-specific antibody transgene. In one embodiment, an expression cassette as described herein may be engineered onto a plasmid which is used for drug delivery or for production of a viral vector. Suitable viral vectors are preferably replication defective and selected from amongst those which target brain cells. Viral vectors may include any virus suitable for gene therapy, including but not limited to adenovirus; herpes virus; lentivirus; retrovirus; parvovirus, etc. However, for ease of understanding, the adeno-associated virus is referenced herein as an exemplary virus vector. A “replication-defective virus” or “viral vector” is a synthetic or recombinant viral particle in which an expression cassette containing a gene of interest is packaged in a viral capsid or envelope, where any viral genomic sequences also packaged within the viral capsid or envelope are replication-deficient; i.e., they cannot generate progeny virions but retain the ability to infect target cells. In one embodiment, the genome of the viral vector does not include genes encoding the molecules required to replicate (the genome can be engineered to be “gutless”-containing only the transgene of interest flanked by the signals required for amplification and packaging of the artificial genome), but these genes may be supplied during production. Therefore, it is deemed safe for use in gene therapy since replication and infection by progeny virions cannot occur except in the presence of the viral proteins required for replication.

[0134] The term “AAV” or “adeno-associated virus” refers to a Dependoparvovirus within the Parvoviridae genus of viruses. The AAV can be an AAV derived from a naturally occurring “wild-type” virus, an AAV derived from a rAAV genome packaged into a capsid comprising capsid proteins encoded by a naturally occurring cap gene and/or from a rAAV genome packaged into a capsid comprising capsid proteins encoded by a non-naturally occurring capsid cap gene. An example of the latter includes a rAAV having a capsid protein comprising a peptide insertion into or modification of the amino acid sequence of the naturally-occurring capsid.

[0135] The term “rAAV” refers to a “recombinant AAV.” In some embodiments, a recombinant AAV has an AAV genome in which part or all of the rep and cap genes have been replaced with heterologous sequences.

[0136] The term “rep-cap plasmid” refers to a plasmid that provides the viral rep and cap gene function and aids the production of AAVs from rAAV genomes lacking functional rep and/or the cap gene sequences.

[0137] The term “cap gene” refers to the nucleic acid sequences that encode capsid proteins that form or help form the capsid coat of the virus. For AAV, the capsid protein may be VP1, VP2, or VP3.

[0138] The term “rep gene” refers to the nucleic acid sequences that encode the non-structural proteins needed for replication and production of virus.

[0139] The term “expression cassette” or “nucleic acid expression cassette” refers to nucleic acid molecules that include the coding sequence for a gene of interest operably linked to one or more transcriptional control elements including, but not limited to promoters, enhancers and/or regulatory elements, introns and polyadenylation sequences. The enhancers and promoters typically function to direct (trans)gene expression in one or more desired cell types, tissues or organs. Polyadenylation sequences such as a bovine growth hormone (bGH) polyadenylation (polyA) site or a SV40 polyA site indicate the site of transcription termination.

[0140] The term “regulatory element” or “nucleic acid regulatory element” are non-coding nucleic acid sequences that control the transcription of neighboring genes. Cis regulatory elements typically regulate gene transcription by binding to transcription factors. This includes “composite nucleic acid regulatory elements” comprising more than one enhancer or promoter elements that regulate expression of transgene.

[0141] The term “operably linked” and “operably linked to” refers to nucleic acid sequences being linked and typically contiguous, or substantially contiguous, and, where necessary to join two protein coding regions, contiguous and in reading frame which functionally impact (increase, decrease or inhibit) or effect the expression of the other sequence, such as, for example a promoter sequence promoting transcription of the coding sequence of a gene of interest. However, since enhancers generally function when separated from the promoter by several kilobases and intronic sequences may be of variable lengths, some polynucleotide elements may be operably linked and still be functional while not directly contiguous with a downstream promoter and transgene.

[0142] The terms “nucleic acids” and “nucleotide sequences” include DNA molecules (e.g., cDNA or genomic DNA), RNA molecules (e.g., mRNA), combinations of DNA and RNA molecules or hybrid DNA/RNA molecules, and analogs of DNA or RNA molecules. Such analogs can be generated using, for example, nucleotide analogs, which include, but are not limited to, inosine or tritylated bases. Such analogs can also comprise DNA or RNA molecules comprising modified backbones that lend beneficial attributes to the molecules such as, for example, nuclease resistance or an increased ability to cross cellular membranes. The nucleic acids or nucleotide sequences can be single-stranded, double-stranded, may contain both single-stranded and double-stranded portions, and may contain triple-stranded portions, but preferably is double-stranded DNA.

[0143] “Percent (%) sequence identity” with respect to a reference polynucleotide or polypeptide sequence is referred to as the percentage of nucleic acids or amino acids in a candidate sequence that are identical to the nucleic acids or amino acids in the reference polynucleotide or polypeptide sequence, after aligning the sequences and introducing gaps, if necessary, to achieve the maximum percent sequence identity. Alignment for purposes of determining percent nucleic acid or amino acid sequence identity can be achieved in various ways that are well-known in the art, for example, using publicly available computer software such as BLAST, BLAST-2, or Megalign software. Using well-recognized and conventional methods, the appropriate parameters can be determined for aligning sequences, including any algorithms needed to achieve maximal alignment over the full length of the sequences being compared. For example, percent sequence identity values may be generated using the sequence comparison computer program BLAST. As an illustration, the percent sequence identity of a given nucleic acid or amino acid sequence, A, to, with, or against a given nucleic acid or amino acid sequence, B, (which can alternatively be phrased as a given nucleic acid or amino acid sequence, A that has a certain percent sequence identity to, with, or against a given nucleic acid or amino acid sequence, B) is calculated as follows:
[0144] 100 multiplied by (the fraction X/Y),
[0145] where X is the number of nucleotides or amino acids scored as identical matches by a sequence alignment program (e.g., BLAST) in that program's alignment of A and B, and where Y is the total number of nucleic acids in B. It will be appreciated that where the length of nucleic acid or amino acid sequence A is not equal to the length of nucleic acid or amino acid sequence B, the percent sequence identity of A to B will not equal the percent sequence identity of B to A.

[0146] As used throughout, AAV “serotype” refers to an AAV having an immunologically distinct capsid, a naturally-occurring capsid, or an engineered capsid.

[0147] The terms “subject”, “host”, and “patient” are used interchangeably. As used herein, a subject is preferably a mammal such as a non-primate (e.g., cows, pigs, horses, cats, dogs, rats etc.) or a primate (e.g., monkey and human), in most cases, a human.

[0148] The terms “therapeutic protein” or “biotherapeutic protein” refer to any protein which is encoded by a transgene, and used in treating, managing, or ameliorating symptoms associated with a disease or disorder, where the disease or disorder is associated with a target molecule or function of the target molecule to be provided by or modulated by (including activated or increased by or inhibited by) the transgene product. Also, a “therapeutically effective amount” refers to the amount of protein, (e.g., amount of protein product expressed by the transgene) that provides at least one therapeutic benefit in the treatment or management of the target disease or disorder, following administration of a gene therapy to a subject suffering therefrom. Further, a therapeutically effective amount with respect to an antibody transgene of the invention means that amount of transgene product alone, or when in combination with other therapies, that provides at least one therapeutic benefit in the treatment or management of the disease or disorder.

[0149] The phrase “tissue-specific” or “tissue-directed” refers to targeting by capsid tropism or transcriptional targeting by use of specific promoters. Viral vector delivery or transduction of genome to specific cells or tissue is characteristic of a capsid's tropism, each capsid, particularly each rAAV capsid having a unique distribution in the body. For example, AAV serotype 9 (AAV9, SEQ ID NO: 132) has unique properties in the CNS, since AAV9 distribution spreads to much larger areas of the CNS after intra-CSF administration compared with other serotypes, however it may also reach the circulation and transduces the liver, providing a peripheral source of therapeutic protein (Samaranch, L. et al. Human Gene Therapy. Apr 2012; 23(4):382-389). In some instances, nucleic acid regulatory elements, such as promoters, drive the cell- or tissue-specific expression of a transgene, since promoters have adapted their activity in specific cells or tissue due to the interaction of such elements with the intracellular environment of such cells. Therefore tissue-specific expression may control the amount of expression in a given tissue. For example, the human synapsin 1 gene promoter (hSYN) provides neuronal-specific transgene expression. Transgene expression exclusively in astrocytes has been demonstrated by the full-length 2.2 bp glial fibrillary acidic protein (GFAP) promoter and its much shorter variant, the GfaABClD promoter, drove transgene expression exclusively in astrocytes. Other examples of promoters are described herein including those presented in Table 8.

### 5.2. Viral Vector Delivery of Tau-Specific Antibodies and Antigen-Binding Fragments and Variants Thereof

[0150] One aspect relates to nucleic acid sequences encoding Tau-specific mAbs, including antigen-binding fragments and forms thereof, and regulatory and structural elements that are arranged in an expression cassette to promote expression of the Tau-specific mAb for delivery to cells to create a permanent depot that continuously supplies the human Tau-specific mAb, e.g., human-glycosylated, transgene product.

[0151] Accordingly, the transgene may be any one of the genes or nucleic acids encoding the therapeutic proteins (e.g., containing the heavy and light chain variable domains of the Tau-specific antibodies) listed in, but not limited to, Table 1 for nucleotide sequences with amino acid sequences of the heavy and light chain variable domains (and Fab portions of the antibodies) in Table 2. Also provided are transgenes encoding anti-Tau-specific antibodies having the heavy chain CDRs of the VH of SEQ ID NO 97, 99 or 101 and the light chain CDRs of the VL of SEQ ID NO: 98, 100 or 102 (interspersed with appropriate framework, including human framework, regions) (CDR amino acid sequences provided in Table 3).

[0152] Provided are Tau-specific mAb heavy and light chain arrangements and nucleic acid regulatory elements that promote mAb transgene expression in CNS tissue. Exemplary nucleotide sequences encoding the individual heavy and light chain variable domains (and Fab fragments thereof) of Tau-specific antibodies are provided in Table 1. Exemplary promoter, enhancer and other elements for transgene expression and arrangement in an expression cassette are provided in Table 8.

[0153] Provided are composite nucleic acid transgene sequences, or “vectored” antibody constructs, for expression of antibody or antigen fragment or variant thereof listed in, but not limited to, Table 2, Table 5 or Table 11G. Accordingly, the transgene may be any one of the transgenes or nucleic acids encoding the therapeutic antibodies comprising nucleic acid sequences encoding heavy and light chain variable domains, including, SEQ ID Nos: 1 and 2, or 3 and 4, or 5 and 6, respectively, for example, as set forth in Table 1. Exemplary vectored antibody expression cassettes for vectorized Fab and full-length IgGs, as well as for various mAb formats, are diagrammed in FIG. 1B and FIG. 1C with amino acid sequences in FIGS. 1D-1F and Tables 2, 5, 11A, 11B, 11C, 11F, and 11G and nucleotide sequences in Tables 1, 11D, 11E, 11F, and 11G.

### 5.2.1. Tau-Binding Molecules

[0154] The Tau-specific antigen-binding molecules described herein convey certain properties and the gene therapy constructs, compositions and methods preserves or enhances the antigen-binding molecules' therapeutic properties, as well as directs the therapeutic molecules to the site of pathological hyperphosphorylated Tau filaments.

[0155] The combinations of heavy and light chain sequences may be expressed by a multicistronic cassette while maintaining the therapeutic molecule's unique binding specificity. Alternatively, the heavy and light chain variable domain sequences may be expressed as a single polypeptide, for example as an scFv or an scFv-hinge-Fc, or other format, as described herein.

[0156] The human monoclonal anti-Tau antibodies described herein were identified in a complex antibody discovery process surprisingly yielding antibodies that bind different forms of Tau in brain tissues of patients suffering from tauopathies, in particular, the antibodies bind pathological hyperphosphorylated Tau filaments in dystrophic neurites, neurofibrillary tangles and neuropil threads, as determined in an immunohistochemical (IHC) assay with brain tissue of patients with Alzheimer's Disease (AD), Progressive supranuclear palsy (PSP) and/or Pick's Disease (PiD) (EP Application No. 20 217 601.2, filed Dec. 29, 2020, which is incorporated by reference herein in its entirety). Tables 1 and 2 present the nucleic acid sequence and encoded amino acid sequence of the VH and VL domains of these antibodies, respectively. Table 2 further includes the amino acid sequences of VH and VL domains fused to portions or all of the constant domain and/or hinge, as indicated. Table 3 presents the amino acid sequences of the heavy and light chain CDR1 CDR2 and CDR3 of the anti-Tau antibodies disclosed herein.

TABLE 1
Tau-specific Antigen-Binding Nucleic Acids

| Antibody | SEQ ID | |
|---|---|---|
| Chain Name | NO: | Nucleic Acid Sequence |
| NI-502.4P3-VH | 1 | gaggtgcagctggtgcagtctggagcagaggtgaagaagcccgggga |
| | | gtctctgaagatctcctgtaaggtttctggatacgactttagcaagt |
| | | actggatcggctgggtgcgccagatgcccgggaaaggcctggagtgg |
| | | atggggctcatctatcctggtgactctgataccagatatagtccatc |
| | | tttggaagggcaagtcagcatctcagccgacaagtccatcagcgccg |
| | | cctacttgcaattcagcagcctgaaggcctcggacagcgccatgtat |
| | | tattgtgtgaggaagggatatagtgcctaccttggagggtggttcga |
| | | cccctggggccagggaaccctggtcaccgtctcctcg |
| NI-502.4P3-VL | 2 | gacatccagttgacccagtctccagactccctggctgcgtctctggg |
| | | cgagagggtcaccatcaactgcaggtccagccagaatattttttaca |
| | | actccaacaataagaacttcttagcttggtatcagcagaaagcagga |
| | | cagtctcctaagttgcttatttactgggcttctacgcgggaatccgg |
| | | ggtccctgaccgattcagtggcagcggctctgggacagatttcactc |
| | | tcaccatcagcggcctgcaggctggagatgtggcagtttatttctgt |
| | | cagcaatattttactgatgctcccactttcggcggagggaccaaggt |
| | | ggagatcaaa |
| NI-502.31B6- | 3 | gaggtgcagctgttgcagtctgggggaggcgtggtccagcctggggg |
| VH | | gtccctgagactctcctgtgaagcctctggattcaccttcagttcct |
| | | attctatgcactgggtccgccaggctccaggcaaggggctggaatgg |
| | | ctgacacttatctcatataatggagtcaataagtattacgcaaagtc |
| | | cgtgaagggccgattcgccatctccagagacgattccaagagcacac |
| | | tgtttttgcaaatgaacagcctgacaactgacgacacggctgtatat |
| | | tactgtgcgagatgtccaatcccgcgggcggcgtcgtatagaaatgg |
| | | agataattatttcgaattcggccagggcaccctggtcaccgtctcct |
| | | cg |
| NI-502.31B6- | 4 | caggctgtggtgactcaggagccatcgctctcagtgtcccctggagg |
| VL | | gacagtcacactcacttgtgccctgagttctgcctcagtctctactt |
| | | cttcgtaccccagctggtaccagcagaccccaggccagcctccacgc |
| | | atgctcatccacaacacagacactcgctcttctggtgtccctgatcg |
| | | cttctctggctccatccttgggaagaaagctgccctcaccatcacgg |
| | | gggcccaggcagatgatgaatctgattactactgtgtggtatatttg |
| | | gggaatggcttttgggtgttcggcggagggaccaagctgaccgtcct |
| | | a |
| NI-502.8H1-VH | 5 | gaggtgcagctggtggagtctgggggaggcttggtgcagccgggggg |
| | | gtccctaagactctcctgtgcagcctccggattcacctttagcatct |
| | | ataccatgagctgggtccgccaggctccagggaaggggctggagtgg |
| | | gtctcagctattctcagtgatggtagcacatactatgcagactccgt |
| | | agagggccgattcaccatctccagagacaattccaagaccaccctgt |
| | | atctacaaatgaacagcctgacagccgaggacacggccgtatattat |
| | | tgtacaaaacgtgttgaggggagctttcgggggtggggccagggaac |
| | | cctggtcaccgtctcctcg |
| NI-502.8H1-VL | 6 | gaaattgtgatgacacagtctccaggcaccctgtctttgtctccagg |
| | | ggaaagcgccaccctctcctgcagggccagtcagagtgttagcacta |
| | | cctacttagcctggtaccagcagaaacctggccaggctcccaggctc |
| | | ctcatctatggtgcatccagcagggccactggcatcccagacagatt |
| | | cagtggcagtgggtctgggacagacttcactctcacaatcagcagac |
| | | tggagcctgaagattttgcagtgtattactgtcagcagtatggtggg |
| | | tcacgcttgatcaccttcggccaagggacacgactggagattaaa |

TABLE 2
Tau-specific Antibody Amino Acid Sequences

| | SEQ ID | Amino Acid Sequence |
|---|---|---|
| Name | NO: | (CDRs in bold) |
| NI-502.4P3 | 97 | EVQLVQSGAEVKKPGESLKISCKVSGYDFSKYWIGWVRQMPGKG |
| VH | | LEWMGLIYPGDSDTRYSPSLEGQVSISADKSISAAYLQFSSLKA |
| | | SDSAMYYCVRKGYSAYLGGWFDPWGQGTLVTVSS |
| NI-502.4P3 | 351 | EVQLVQSGAEVKKPGESLKISCKVSGYDFSKYWIGWVRQMPGKG |
| VH + C_{H}1(IgG1) | | LEWMGLIYPGDSDTRYSPSLEGQVSISADKSISAAYLQFSSLKA |
| | | SDSAMYYCVRKGYSAYLGGWFDPWGQGTLVTVSSASTKGPSVFP |
| | | LAPSSKSTSGGTAALGCLVKDYFPEPVTVSWNSGALTSGVHTFP |
| | | AVLQSSGLYSLSSVVTVPSSSLGTQTYICNVNHKPSNTKVDKRV |
| NI-502.4P3 | 352 | EVQLVQSGAEVKKPGESLKISCKVSGYDFSKYWIGWVRQMPGKG |
| VH + C_{H}1(IgG2) | | LEWMGLIYPGDSDTRYSPSLEGQVSISADKSISAAYLQFSSLKA |
| | | SDSAMYYCVRKGYSAYLGGWFDPWGQGTLVTVSSASTKGPSVFP |
| | | LAPCSRSTSESTAALGCLVKDYFPEPVTVSWNSGALTSGVHTFP |
| | | AVLQSSGLYSLSSVVTVPSSNFGTQTYTCNVDHKPSNTKVDKTV |
| NI-502.4P3 | 353 | EVQLVQSGAEVKKPGESLKISCKVSGYDFSKYWIGWVRQMPGKG |
| VH + C_{H}1(IgG4) | | LEWMGLIYPGDSDTRYSPSLEGQVSISADKSISAAYLQFSSLKA |
| | | SDSAMYYCVRKGYSAYLGGWFDPWGQGTLVTVSSASTKGPSVFP |
| | | LAPCSRSTSESTAALGCLVKDYFPEPVTVSWNSGALTSGVHTFP |
| | | AVLQSSGLYSLSSVVTVPSSSLGTKTYTCNVDHKPSNTKVDKRV |
| NI-502.4P3 VH + C_{H}1 + Hinge (IgG1) | 187 | [chemical structure] |
| NI-502.4P3 VH + C_{H}1 + Hinge (IgG2) | 354 | [chemical structure] |
| NI-502.4P3 VH + C_{H}1 + Hinge (IgG4) | 355 | [chemical structure] |
| NI-502.4P3 | 98 | DIQLTQSPDSLAASLGERVTINCRSSQNIFYNSNNKNFLAWYQQ |
| VL | | KAGQSPKLLIYWASTRESGVPDRFSGSGSGTDFTLTISGLQAGD |
| | | VAVYFCQQYFTDAPTFGGGTKVEIK |
| NI-502.4P3- | 188 | DIQLTQSPDSLAASLGERVTINCRSSQNIFYNSNNKNFLAWYQQ |
| VL + CL (kappa) | | KAGQSPKLLIYWASTRESGVPDRFSGSGSGTDFTLTISGLQAGD |
| | | VAVYFCQQYFTDAPTFGGGTKVEIKRTVAAPSVFIFPPSDEQLK |
| | | SGTASVVCLLNNFYPREAKVQWKVDNALQSGNSQESVTEQDSKD |
| | | STYSLSSTLTLSKADYEKHKVYACEVTHQGLSSPVTKSFNRGEC |
| NI-502.4P3- | 366 | DIQLTQSPDSLAASLGERVTINCRSSQNIFYNSNNKNFLAWYQQ |
| VL + CL | | KAGQSPKLLIYWASTRESGVPDRFSGSGSGTDFTLTISGLQAGD |
| (lambda) | | VAVYFCQQYFTDAPTFGGGTKVEIKGQPKAAPSVTLFPPSSEEL |
| | | QANKATLVCLISDFYPGAVTVAWKADSSPVKAGVETTTPSKQSN |
| | | NKYAASSYLSLTPEQWKSHRSYSCQVTHEGSTVEKTVAPTCS |
| NI-502.31B6 | 99 | EVQLLQSGGGVVQPGGSLRLSCEASGFTFSSYSMHWVRQAPGKG |
| VH | | LEWLTLISYNGVNKYYAKSVKGRFAISRDDSKSTLFLQMNSLTT |
| | | DDTAVYYCARCPIPRAASYRNGDNYFEFGQGTLVTVSS |
| NI-502.31B6 | 356 | EVQLLQSGGGVVQPGGSLRLSCEASGFTFSSYSMHWVRQAPGKG |
| VH + C_{H}1(IgG1) | | LEWLTLISYNGVNKYYAKSVKGRFAISRDDSKSTLFLQMNSLTT |
| | | DDTAVYYCARCPIPRAASYRNGDNYFEFGQGTLVTVSSASTKGP |
| | | SVFPLAPSSKSTSGGTAALGCLVKDYFPEPVTVSWNSGALTSGV |
| | | HTFPAVLQSSGLYSLSSVVTVPSSSLGTQTYICNVNHKPSNTKV |
| | | DKRV |
| NI-502.31B6 | 357 | EVQLLQSGGGVVQPGGSLRLSCEASGFTFSSYSMHWVRQAPGKG |
| VH + C_{H}1(IgG2) | | LEWLTLISYNGVNKYYAKSVKGRFAISRDDSKSTLFLQMNSLTT |
| | | DDTAVYYCARCPIPRAASYRNGDNYFEFGQGTLVTVSSASTKGP |
| | | SVFPLAPCSRSTSESTAALGCLVKDYFPEPVTVSWNSGALTSGV |
| | | HTFPAVLQSSGLYSLSSVVTVPSSNFGTQTYTCNVDHKPSNTKV |
| | | DKTV |
| NI-502.31B6 | 358 | EVQLLQSGGGVVQPGGSLRLSCEASGFTFSSYSMHWVRQAPGKG |
| VH + C_{H}1(IgG4) | | LEWLTLISYNGVNKYYAKSVKGRFAISRDDSKSTLFLQMNSLTT |
| | | DDTAVYYCARCPIPRAASYRNGDNYFEFGQGTLVTVSSASTKGP |
| | | SVFPLAPCSRSTSESTAALGCLVKDYFPEPVTVSWNSGALTSGV |
| | | HTFPAVLQSSGLYSLSSVVTVPSSSLGTKTYTCNVDHKPSNTKV |
| | | DKRV |
| NI-502.31B6 VH + C_{H}1 + Hinge (IgG1) | 189 | [chemical structure] |
| NI-502.31B6 VH + C_{H}1 + Hinge (IgG2) | 359 | [chemical structure] |
| NI-502.31B6 VH + C_{H}1 + Hinge (IgG4) | 360 | [chemical structure] |
| NI-502.31B6 | 100 | QAVVTQEPSLSVSPGGTVTLTCALSSASVSTSSYPSWYQQTPGQ |
| VL | | PPRMLIHNTDTRSSGVPDRFSGSILGKKAALTITGAQADDESDY |
| | | YCVVYLGNGFWVFGGGTKLTVL |
| NI-502.31B6 | 190 | QAVVTQEPSLSVSPGGTVTLTCALSSASVSTSSYPSWYQQTPGQ |
| VL + CL | | PPRMLIHNTDTRSSGVPDRFSGSILGKKAALTITGAQADDESDY |
| (lambda) | | YCVVYLGNGFWVFGGGTKLTVLGQPKAAPSVTLFPPSSEELQAN |
| | | KATLVCLISDFYPGAVTVAWKADSSPVKAGVETTTPSKQSNNKY |
| | | AASSYLSLTPEQWKSHRSYSCQVTHEGSTVEKTVAPTCS |
| NI-502.31B6 | 367 | QAVVTQEPSLSVSPGGTVTLTCALSSASVSTSSYPSWYQQTPGQ |
| VL + CL (kappa) | | PPRMLIHNTDTRSSGVPDRFSGSILGKKAALTITGAQADDESDY |
| | | YCVVYLGNGFWVFGGGTKLTVLRTVAAPSVFIFPPSDEQLKSGT |
| | | ASVVCLLNNFYPREAKVQWKVDNALQSGNSQESVTEQDSKDSTY |
| | | SLSSTLTLSKADYEKHKVYACEVTHQGLSSPVTKSFNRGEC |
| NI-502.8H1 | 101 | EVQLVESGGGLVQPGGSLRLSCAASGFTFSIYTMSWVRQAPGKG |
| VH | | LEWVSAILSDGSTYYADSVEGRFTISRDNSKTTLYLQMNSLTAE |
| | | DTAVYYCTKRVEGSFRGWGQGTLVTVSS |
| NI-502.8H1- | 361 | EVQLVESGGGLVQPGGSLRLSCAASGFTFSIYTMSWVRQAPGKG |
| VH + C_{H}1(IgG1) | | LEWVSAILSDGSTYYADSVEGRFTISRDNSKTTLYLQMNSLTAE |
| | | DTAVYYCTKRVEGSFRGWGQGTLVTVSSASTKGPSVFPLAPSSK |
| | | STSGGTAALGCLVKDYFPEPVTVSWNSGALTSGVHTFPAVLQSS |
| | | GLYSLSSVVTVPSSSLGTQTYICNVNHKPSNTKVDKRV |
| NI-502.8H1- | 362 | EVQLVESGGGLVQPGGSLRLSCAASGFTFSIYTMSWVRQAPGKG |
| VH + C_{H}1(IgG2) | | LEWVSAILSDGSTYYADSVEGRFTISRDNSKTTLYLQMNSLTAE |
| | | DTAVYYCTKRVEGSFRGWGQGTLVTVSSASTKGPSVFPLAPCSR |
| | | STSESTAALGCLVKDYFPEPVTVSWNSGALTSGVHTFPAVLQSS |
| | | GLYSLSSVVTVPSSNFGTQTYTCNVDHKPSNTKVDKTV |
| NI-502.8H1- | 363 | EVQLVESGGGLVQPGGSLRLSCAASGFTFSIYTMSWVRQAPGKG |
| VH + C_{H}1(IgG4) | | LEWVSAILSDGSTYYADSVEGRFTISRDNSKTTLYLQMNSLTAE |
| | | DTAVYYCTKRVEGSFRGWGQGTLVTVSSASTKGPSVFPLAPCSR |
| | | STSESTAALGCLVKDYFPEPVTVSWNSGALTSGVHTFPAVLQSS |
| | | GLYSLSSVVTVPSSSLGTKTYTCNVDHKPSNTKVDKRV |
| NI-502.8H1- VH + C_{H}1 + Hinge (IgG1) | 191 | [chemical structure] |
| NI-502.8H1- VH + C_{H}1 + Hinge (IgG2) | 364 | [chemical structure] |
| NI-502.8H1- VH + C_{H}1 + Hinge (IgG4) | 365 | [chemical structure] |
| NI-502.8H1 | 102 | EIVMTQSPGTLSLSPGESATLSCRASQSVSTTYLAWYQQKPGQA |
| VL | | PRLLIYGASSRATGIPDRFSGSGSGTDFTLTISRLEPEDFAVYY |
| | | CQQYGGSRLITFGQGTRLEIK |
| NI-502.8H1 | 192 | EIVMTQSPGTLSLSPGESATLSCRASQSVSTTYLAWYQQKPGQA |
| VL + CL | | PRLLIYGASSRATGIPDRFSGSGSGTDFTLTISRLEPEDFAVYY |
| (kappa) | | CQQYGGSRLITFGQGTRLEIKRTVAAPSVFIFPPSDEQLKSGTA |
| | | SVVCLLNNFYPREAKVQWKVDNALQSGNSQESVTEQDSKDSTYS |
| | | LSSTLTLSKADYEKHKVYACEVTHQGLSSPVTKSFNRGEC |
| NI-502.8H1 | 368 | EIVMTQSPGTLSLSPGESATLSCRASQSVSTTYLAWYQQKPGQA |
| VL + CL | | PRLLIYGASSRATGIPDRFSGSGSGTDFTLTISRLEPEDFAVYY |
| (lambda) | | CQQYGGSRLITFGQGTRLEIKGQPKAAPSVTLFPPSSEELQANK |
| | | ATLVCLISDFYPGAVTVAWKADSSPVKAGVETTTPSKQSNNKYA |
| | | ASSYLSLTPEQWKSHRSYSCQVTHEGSTVEKTVAPTCS |

TABLE 3
CDR sequences

| Antibody | CDR | SEQ ID NO: | Sequence |
|---|---|---|---|
| 4P3 | VH-CDR1 | 154 | KYWIG |
| | VH-CDR2 | 155 | LIYPGDSDT |
| | VH-CDR3 | 156 | KGYSAYLGGWFDP |
| | VL-CDR1 | 157 | RSSQNIFYNSNNKNFLA |
| | VL-CDR2 | 158 | WASTRES |
| | VL-CDR3 | 159 | QQYFTDAPT |
| 31B6 | VH-CDR1 | 160 | SYSMH |
| | VH-CDR2 | 161 | LISYNGVNKYYAKSVKG |
| | VH-CDR3 | 162 | CPIPRAASYRNGDNYFE |
| | VL-CDR1 | 163 | ALSSASVSTSSYPS |
| | VL-CDR2 | 164 | NTDTRSS |
| | VL-CDR3 | 165 | VVYLGNGFWV |
| 8H1 | VH-CDR1 | 166 | IYTMS |
| | VH-CDR2 | 167 | AILSDGSTYYADSVEG |
| | VH-CDR3 | 168 | RVEGSFRG |
| | VL-CDR1 | 169 | GASSRAT |
| | VL-CDR2 | 170 | RASQSVSTTYLA |
| | VL-CDR3 | 171 | QQYGGSRLIT |

[0157] Several anti-Tau antibodies against various epitopes of tau have been cloned and tested in IHC assays, only a few of which were found to bind Tau in brain tissue of patients with AD; see Table 4. Antibodies NI-502.4P3, NI-502.31B6, and NI-502.8H1 all bind in brain tissues of patients with AD, with PSP, and with PiD, as well as brain tissue extracts from transgenic mice hemizygous for Tau P301L (also known as FTDP-17 mutation) (Lewis, J. et al. 2000 Nature Genetics 25:402-405). Furthermore, said antibodies have been found to capture Tau and AD-associated Tau in an immunoprecipitation (IP) assay with brain extracts of patients with AD (Table 4).

TABLE 4
Binding properties of anti-Tau antibodies

| | | IHC | IP | |
|---|---|---|---|---|
| | | Human | Human | IHC |
| Antibody | Epitope | AD | AD | P301L |
| NI- | 217-TPPTREPKKVA-227 (SEQ ID NO: 120) and | + | + | + |
| 502.4P3 | 249-PMPDLKN-255 (SEQ ID NO: 121) | | | |
| (4P3) | | | | |
| NI- | pS202/pT205: SGYSSPG(pS)PG(pT)PGSRSRT | + | + | + |
| 502.31B6 | (SEQ ID NO: 122) | | | |
| (31B6) | | | | |
| NI- | pT212/pS214: GTPGSRSR(pT)P(pS)LPTPPTR | + | + | + |
| 502.8H1 | (SEQ ID NO: 123) | | | |
| (8H1) | | | | |

[0158] The binding specificity and EC50 of human-derived, Tau-specific antibodies were also determined by indirect ELISA (See Section 5.8, infra, for exemplary assay for determining the EC50). Antibody NI-502.4P3 specifically recognized the Tau protein with an EC50 of 15.0 nM. Antibody NI-502.31B6 specifically targeted the synthetic phosphorylated peptide Tau pS202/pT205 with an EC50 of 2.0 nM whereas antibody NI-502.8H1 specifically bound the synthetic phosphorylated peptide Tau pT212/pS214 with an EC50 of 2.2 nM. The Tau-specific antibodies were shown to specifically recognize human Tau. By “specifically recognizing tau”, “binding tau”, “antibody specific to/for tau” and “anti-tau antibody” means specifically, generally, and collectively, antibodies to the native form of tau, or aggregated or pathologically modified tau isoforms. Provided herein are human antibodies selective for full-length, pathologically phosphorylated and aggregated forms. Furthermore, specific recognition or binding to tau epitopes may be determined by well-known methods. One such method, Pepspot™ epitope mapping analysis, was used to map epitopes within the human Tau protein recognized by the Tau specific antibodies. Pepscan membrane loaded with over 100 linear 15-meric peptides having about 11 aa overlap between individual peptides covering the entire human Tau protein sequence were used. Overlapping amino acids between peptides being recognized by each test antibody elucidated the putative binding epitopes.

[0159] In addition, antibodies NI-502.4P3, NI-502.31B6 and NI-502.8H1 could be shown to deplete seeding-competent tau from AD homogenates; see FIGS. 12A to 12C.

[0160] Table 2 provides the amino acid sequence of the heavy and light chain variable domains of the anti-Tau mAbs. Table 2 further provides the amino acid sequences of the heavy and light chains of the Fab fragments-including the VH—C_{H}1 and VL-CL, or VH, C_{H}1 and at least a portion of the hinge region of the heavy chain and the VL and constant domain of the light chain (CL). In some embodiments, the antibodies of Table 2 further comprise a constant region, including a C_{H}1 domain or a CL domain, and optionally, for the heavy chains, an Fc domain (which includes the C_{H}2 and C_{H}3 domains of the heavy chain). In embodiments, the antibodies are full length antibodies having VH—C_{H}1-C_{H}2-C_{H}3 domains for the heavy chain and VL-CL for the light chain. In some embodiments, the constant region, including the Fc domain, of the antibody is selected from a constant domain or Fc domain from human IgG1, human IgG2, human IgG4, mouse IgG2a or mouse IgG2b, or a variant thereof (as described in Section 5.2.4, which amino acid sequences are provided in Table 6).

[0161] CDR sequences of the heavy and light chain variable domains in the sequences provided by Table 2 may be readily discerned by those skilled in the art. Accordingly, provided are anti-Tau antibodies having the CDRs of the heavy and light chain variable domains interspersed among human framework regions. Table 3 provides the exemplary amino acid sequences for the CDR1, CDR2 and CDR3 of the heavy chain variable domain and the CDR1, CDR2 and CDR3 of the light chain variable domain. It will be appreciated that these CDR sequences may be interspersed among variable domain framework sequences, particularly human framework sequences, to introduce the antigen binding domain of NI-502.4P3, NI-502.31B6, or NI-502.8H1 into an anti-Tau antibody as known by those in the art. Further, one, two, three, four or more amino acid substitutions may be made in the framework regions or the CDRs to improve binding efficiency using methods well known in the art.

[0162] Furthermore, sequence analysis, i.e. comparison of the human Tau sequence (NCBI Gene ID: 4137) with the mouse Tau sequence (NCBI Gene ID: 17762) revealed that the binding epitopes of antibody NI-502.4P3 are shared between human and murine Tau proteins, which makes it prudent to assume that antibody NI-502.4P3 also recognizes the murine Tau protein.

[0163] In addition, the epitopes of antibody NI-502.4P3 are located adjacent to and in the microtubule binding region (MTBR), respectively, which spans from residues 224-369 of Tau; see, e.g., Horie et al., Brain 144 (2021), 515-527. Antibodies binding an epitope in that upstream region of MTBR demonstrated a significant and selective ability to mitigate tau seeding and a reduction of inducing tau pathology in cellular and in vivo transgenic mice models seeded by human Alzheimer's disease brain extracts; see summary in Horie et al., (2021) and references cited therein.

### 5.2.2. Transgenes

[0164] The transgenes provided herein encode an anti-Tau mAb, particularly either as a full-length antibody or an antigen binding fragment thereof, e.g. a Fab or Fab′ fragment or a F(ab′)₂, or a synthetic or recombinant form incorporating an antigen-binding domain thereof (such as, for example, an scFv, minibody, diabody, nanobody, scFv-Fc). Exemplary structures of antigen-binding fragments and recombinant forms are depicted in FIG. 1A and schematics of exemplary transgenes are provided in FIGS. 1B and 1C. Exemplary nucleotide sequences that are encompassed by the disclosed transgenes and the amino acid sequences of the anti-Tau antibodies, antigen binding fragments and recombinant forms encoded by the transgenes can be found in Tables 2, 5, and 11A-11G.

[0165] In certain embodiments, provided are transgenes that encode the anti-Tau antibody, the anti-Tau antigen-binding fragment or other recombinant anti-Tau antigen-binding form which comprise the nucleotide sequences encoding the heavy and light chains of the variable regions of NI-502.4P3 (nucleotide sequences SEQ ID NOs. 1 and 2, respectively, see Table 1). The nucleotide sequences may be codon optimized for expression in human cells. The amino acid sequences of the heavy and light chain variable domains of NI-502.4P3 (also 4P3) are provided in Table 2, and, in particular, are SEQ ID NO: 97 (encoding the NI-502.4P3 heavy chain variable portion) and SEQ ID NO: 98 (encoding the NI-502.4P3 light chain variable portion). Exemplary transgene products are depicted in FIG. 1D. The transgene may encode heavy and light chain variable domain sequences that have a signal or leader sequence at the N-terminus appropriate for expression and secretion in human cells, in particular, human CNS cells. The signal sequence may have the amino acid sequence of MYRMQLLLLIALSLALVTNS (SEQ ID NO: 87) or a signal sequence listed in Table 9.

[0166] In addition to the heavy and light chain variable domains, the heavy and light chains encoded by the transgene may also comprise C_{H}1 and CL domain sequences, and, in certain embodiments, the transgenes may comprise, at the C-terminus of the heavy chain C_{H}1 domain sequence, all or a portion of the hinge region (Table 7 for hinge sequences). The C_{H}1-domain may be an IgG1 C_{H}1 (SEQ ID NO: 193), IgG2 C_{H}1 (SEQ ID NO: 194) or IgG4 C_{H}1 (SEQ ID NOs: 195) domain. In some embodiments, the anti-Tau-antigen binding domain has or comprises a heavy chain variable domain of SEQ ID NO: 97, and a C_{H}1 of IgG1 (SEQ ID NO: 193), IgG2 (SEQ ID NO: 194) or IgG4 (SEQ ID NO: 195), or a variant thereof. In certain embodiments, the anti-Tau-antigen binding domain has a heavy chain domain comprising VH and C_{H}1, with the heavy chain consisting of or comprising an amino acid sequence of SEQ ID NOs: 351, 352, or 353 (Table 2) and a light chain consisting of or comprising a VL and a CL with an amino acid sequence of SEQ ID NO: 188 or 366.

[0167] In certain embodiments, the anti-Tau-antigen binding domain has a heavy chain variable domain of SEQ ID NO: 97 and a IgG1 C_{H}1 domain sequence (SEQ ID NO: 193) with additional hinge region sequence starting after the C-terminal valine (V), contains all or a portion of the amino acid sequence EP, EPKS, EPKS, EPKSCDKTHTCPPCPAPELLGG (SEQ ID NO: 172), EPKSCDKTHTCPPCPA(SEQ ID NO: 173), EPKSCDKTHT(SEQ ID NO: 174), EPKSCDKTHLCPPCPAPELLGG (SEQ ID NO: 175), EPKSCDKTHLCPPCPA(SEQ ID NO: 176), EPKSCDKTHL(SEQ ID NO: 177), EPKSCDKTHTCPPCPAPELLGGPSVFL (SEQ ID NO: 178) or EPKSCDKTHLCPPCPAPELLGGPSVFL (SEQ ID NO: 179) as set forth in FIG. 1D. In particular embodiments, the anti-Tau antigen binding domain has a heavy chain comprising a VH, C_{H}1 and all or a portion of the hinge domain, with the heavy chain consisting of or comprising an amino acid sequence of SEQ ID NO: 187 and a light chain consisting of or comprising a VL and a CL (for example a kappa CL or a lambda CL) with an amino acid sequence of SEQ ID NO: 188 or 366 (see FIG. 1D and Table 2 for heavy and light chain sequences).

[0168] In other embodiments, the anti-Tau-antigen binding domain has a heavy chain variable domain of SEQ ID NO: 97 and a IgG4 C_{H}1 domain sequence (e.g. SEQ ID NO: 195) with optionally additional hinge region sequence starting after the C-terminal valine (V), contains all or a portion of the amino acid sequence, ES, ESKY, ESKYGPPCPPCPAPEFLGG (SEQ ID NO: 180), and specifically, ESKYGPPCPPCPA (SEQ ID NO: 181), ESKYGPPCPSCPA (SEQ ID NO: 182), ESKYGPPCPSCPAPEFLGGPSVFL (SEQ ID NO: 183), or ESKYGPPCPPCPAPEFLGGPSVFL (SEQ ID NO: 184). In other embodiments, the anti-Tau-antigen binding domain has a heavy chain variable domain of SEQ ID NO: 97 and a IgG2 C_{H}1 domain sequence (e.g. SEQ ID NO: 194) with additional hinge region sequence starting after the C-terminal valine (V), contains all or a portion of the amino acid sequence ERKCCVECPPCPAPPVAG (SEQ ID NO: 185) or ERKCCVECPPCPA (SEQ ID NO: 186). See also Table 7 for a listing of the amino acid sequences of hinge regions.

[0169] In another embodiment, the transgenes comprise the amino acid sequences encoding the full length (or substantially full length) heavy and light chains of the antibody, that is, the heavy chain comprises the VH, C_{H}1 and hinge domain and, in addition, the Fc domain. The Fc domains that may be incorporated into the anti-Tau antibodies encoded by the transgenes described herein are as disclosed in Section 5.2.4, infra. The Fc domain which includes the C_{H}2 and C_{H}3 domains of the heavy chain may be an IgG1 (SEQ ID NO: 196), IgG2 (SEQ ID NO: 197) or IgG4 (SEQ ID NO: 198) Fc domain and may have one or more amino acid modifications that alter Fc effector function (including altered binding to one or more Fc receptors) or increase serum half-life (e.g. LALA-PG). In particular embodiments, the Fc domain has an amino acid sequence of SEQ ID NOs: 196, 197, or 198 (Table 6), or a mutant or variant thereof. Exemplary amino acid sequences of the entire constant region (SEQ ID NOs: 103, 105, 107, 109, or 110) comprising C_{H}1 domain, hinge region, C_{H}2 domain, and C_{H}3 domain are also provided in Table 6. Also provided are anti-Tau mAbs which have a murine constant region or Fc domain (for example an IgG2a Fc domain or the entire IgG2a constant region, SEQ ID NOs: 112 or 113) which may be useful for study in mouse models of disease.

[0170] In certain embodiments, the anti-Tau antigen-binding fragment transgene encodes an Tau antigen-binding fragment comprising a light chain variable domain comprising an amino acid sequence that is at least 85%, 86%, 87%, 88%, 89%, 90%, 91%, 92%, 93%, 94%, 95%, 96%, 97%, 98% or 99% identical to the sequence set forth in SEQ ID NO: 98. In certain embodiments, the anti-Tau antigen-binding fragment transgene encodes an Tau antigen-binding fragment comprising a heavy chain variable domain comprising an amino acid sequence that is at least 85%, 86%, 87%, 88%, 89%, 90%, 91%, 92%, 93%, 94%, 95%, 96%, 97%, 98% or 99% identical to the sequence set forth in SEQ ID NO: 97. In certain embodiments, the anti-Tau antigen-binding fragment transgene encodes an antigen-binding fragment comprising a light chain variable domain comprising an amino acid sequence that is at least 85%, 86%, 87%, 88%, 89%, 90%, 91%, 92%, 93%, 94%, 95%, 96%, 97%, 98% or 99% identical to the sequence set forth in SEQ ID NO: 98 and a heavy chain variable domain comprising an amino acid sequence that is at least 85%, 86%, 87%, 88%, 89%, 90%, 91%, 92%, 93%, 94%, 95%, 96%, 97%, 98% or 99% identical to the sequence set forth in SEQ ID NO: 97. In certain embodiments, the Tau antigen binding fragment comprises a heavy chain variable domain comprising an amino acid sequence of SEQ ID NO: 97 with 1, 2, 3, 4, 5, 6, 7, 8, 9, 10, 11, 12, 13, 14, 15 or more amino acid substitutions, insertions or deletions, and the substitutions, insertions or deletions are made, e.g., in the framework regions (e.g., those regions outside of the CDRs, which CDRs are underlined in FIG. 1D and the sequences set forth in Table 3 (SEQ ID NOs: 154, 155, and 156, being the amino acid sequences of the VH-CDR1, VH-CDR2 and VH-CDR3, respectively). In certain embodiments, the Tau antigen binding fragment comprises a light chain comprising an amino acid sequence of SEQ ID NO: 98 with 1, 2, 3, 4, 5, 6, 7, 8, 9, 10, 11, 12, 13, 14, 15 or more amino acid substitutions, insertions or deletions, and the substitutions, insertions or deletions are made, e.g., in the framework regions (e.g., those regions outside of the CDRs, which CDRs are underlined in FIG. 1D and the sequences set forth in Table 3 (SEQ ID NOs: 157, 158, and 159 being the amino acid sequence of VL-CDR1, VL-CDR2 and VL-CDR3, respectively). In certain embodiments, the anti-Tau antigen-binding fragment transgene encodes a hyperglycosylated NI-502.4P3 Fab, comprising a heavy chain and a light chain of SEQ ID NOs: 187 and 188, respectively, with one or more of the following mutations: L117N (heavy chain) and/or Q166N, Q166S, and/or E201N (light chain).

[0171] In certain embodiments, the anti-Tau antigen binding fragment transgene encodes an antigen binding fragment and comprises the nucleotide sequences encoding the six NI-502.4P3 CDRs, which may be determined readily by those skilled in the art and including those which are underlined in the heavy and light chain variable domain sequences of FIG. 1D (see also Table 3) which are spaced between framework regions, generally human framework regions, and associated with constant domains depending upon the form of the antigen-binding molecule, as is known in the art to form the heavy and/or light chain variable domain of an anti-Tau antibody or antigen-binding fragment thereof. In certain embodiments, the anti-Tau antigen-binding fragment transgene encodes an antigen-binding fragment and comprises the nucleotide sequences encoding the six NI-502.4P3 CDRs (comprising, for example, SEQ ID NOs: 154-159) which are underlined in the heavy and light chain variable domain sequences of FIG. 1D which are spaced between framework regions, generally human framework regions, and associated with constant domains depending upon the form of the antigen-binding molecule, as is known in the art to form the heavy and/or light chain variable domain of an anti-Tau antibody or antigen-binding fragment thereof.

[0172] Exemplary transgenes are provided that comprise nucleotide sequences encoding anti-Tau ScFvs or anti-Tau ScFv-Fcs include, for example, the nucleotide sequences of SEQ ID NOs:369-370. In some embodiments, the transgenes are present in artificial AAV genomes in which the transgene is flanked by ITR sequences, for example the nucleotide sequence of SEQ ID NO:369. Exemplary transgenes that encode an anti-Tau Fab include nucleotide sequences of SEQ ID NOs:378 to 379. In some embodiments, the transgenes are present in constructs providing an ITR to ITR cassette of SEQ ID NO:378.

[0173] The transgenes provided herein encode an anti-Tau mAb (FIG. 1D), particularly either as a full-length antibody or an antigen binding fragment thereof, e.g. a Fab or Fab′ fragment or a F(ab′)₂, or a synthetic or recombinant form incorporating an antigen-binding domain thereof (such as, for example, an scFv, minibody, diabody, nanobody, scFv-Fc). Exemplary structures of antigen-binding fragments and recombinant forms are depicted in FIG. 1A, exemplary transgenes are depicted in FIGS. 1B and 1C, and exemplary amino acid sequences as well as nucleotide sequences are provided in Tables 2, 5, and 11A-11G.

[0174] In certain embodiments, provided are transgenes that encode the anti-Tau antibody, the anti-Tau antigen-binding fragment or other recombinant anti-Tau antigen-binding form which comprises the nucleotide sequences encoding the heavy and light chains of the variable regions of NI-502.31B6 (31B6) (nucleotides sequences SEQ ID NOs. 3 and 4, respectively, see Table 1). The nucleotide sequences may be codon optimized for expression in human cells. The amino acid sequences of the heavy and light chain variable domains of NI-502.31B6 are provided in Table 2, and in particular, are SEQ ID NO: 99 (encoding the NI-502.31B6 heavy chain variable portion) and SEQ ID NO: 100 (encoding the NI-502.31B6 light chain variable portion). Exemplary transgene products are provided in FIG. 1E. The transgene may encode heavy and light chain variable domain sequences that have a signal or leader sequence at the N-terminus appropriate for expression and secretion in human cells, in particular, human CNS cells. The signal sequence may have the amino acid sequence of MYRMQLLLLIALSLALVTNS (SEQ ID NO: 87) or a signal sequence listed in Table 9.

[0175] In addition to the heavy and light chain variable domains, the heavy and light chains encoded by the transgene may also comprise C_{H}1 and CL domain sequences, and, in certain embodiments, the transgenes may comprise, at the C-terminus of the heavy chain C_{H}1 domain sequence, all or a portion of the hinge region. The C_{H}1-domain may be an IgG1 (SEQ ID NO: 193), IgG2 (SEQ ID NO: 194) or IgG4 (SEQ ID NO: 195) C_{H}1 domain. In some embodiments, the anti-Tau-antigen binding domain has or comprises a heavy chain variable domain of SEQ ID NO: 99, and a C_{H}1 of IgG1 (SEQ ID NO: 193), IgG2 (SEQ ID NO: 194) or IgG4 (SEQ ID NO: 195), or a variant thereof. In certain embodiments, the anti-Tau-antigen binding domain has a heavy chain domain comprising VH and C_{H}1, with the heavy chain consisting of or comprising an amino acid sequence of SEQ ID NOs: 356 (IgG1), 357 (IgG2), or 358 (IgG4) (Table 2) and a light chain consisting of or comprising a VL and a CL with an amino acid sequence of SEQ ID NO: 190 or 367.

[0176] In certain embodiments, the anti-Tau-antigen binding domain has a heavy chain variable domain of SEQ ID NO: 99 and a IgG1 C_{H}1 domain sequence (SEQ ID NO: 193) with additional hinge region sequence starting after the C-terminal valine (V), contains all or a portion of the amino acid sequence EP, EPKS, EPKSCDKTHTCPPCPAPELLGG (SEQ ID NO: 172), EPKSCDKTHTCPPCPA (SEQ ID NO: 173), EPKSCDKTHT(SEQ ID NO: 174), EPKSCDKTHLCPPCPAPELLGG (SEQ ID NO: 175), EPKSCDKTHLCPPCPA(SEQ ID NO: 176), EPKSCDKTHL(SEQ ID NO: 177), EPKSCDKTHTCPPCPAPELLGGPSVFL (SEQ ID NO: 178) or EPKSCDKTHLCPPCPAPELLGGPSVFL (SEQ ID NO: 179) as set forth in FIG. 1E. In particular embodiments, the anti-Tau antigen binding domain has a heavy chain comprising a VH, C_{H}1 and all or a portion of the hinge domain, with the heavy chain consisting of or comprising an amino acid sequence of SEQ ID NO: 189 and a light chain consisting of or comprising a VL and a CL (for example a lambda CL) with an amino acid sequence of SEQ ID NO: 190 (see FIG. 1E and Table 2 for heavy and light chain amino acid sequences).

[0177] In other embodiments, the anti-Tau-antigen binding domain has a heavy chain variable domain of SEQ ID NO: 99 and a IgG4 C_{H}1 domain sequence (Table 6, SEQ ID NO: 195) with optionally additional hinge region sequence starting after the C-terminal valine (V), contains all or a portion of the amino acid sequence ESKYGPPCPPCPAPEFLGG (SEQ ID NO: 180), and specifically, ES, ESKY, ESKYGPPCPPCPA (SEQ ID NO: 181), ESKYGPPCPSCPA (SEQ ID NO: 182), ESKYGPPCPSCPAPEFLGGPSVFL (SEQ ID NO: 183), or ESKYGPPCPPCPAPEFLGGPSVFL (SEQ ID NO: 184). In other embodiments, the anti-Tau-antigen binding domain has a heavy chain variable domain of SEQ ID NO: 99 and a IgG2 C_{H}1 domain sequence (SEQ ID NO: 194) with additional hinge region sequence starting after the C-terminal valine (V), contains all or a portion of the amino acid sequence ERKCCVECPPCPAPPVAG (SEQ ID NO: 185) or ERKCCVECPPCPA (SEQ ID NO: 186). See also Table 7 for a listing of the amino acid sequences of hinge regions.

[0178] In another embodiment, the transgenes comprise the amino acid sequences encoding the full length (or substantially full length) heavy and light chains of the antibody, that is the heavy chain comprising the VH, C_{H}1, hinge and, in addition, the Fc domain at the C terminus of the heavy chain. The Fc domains that may be incorporated into the anti-Tau antibodies encoded by the transgenes described herein are as disclosed in Section 5.2.3.1, infra. The Fc domain may be an IgG1 (SEQ ID NO: 196), IgG2 (SEQ ID NO: 197) or IgG4 (SEQ ID NO: 198) Fc domain and may have one or more amino acid modifications that alter Fc effector function (including altered binding to one or more Fc receptors) or increase serum half-life. In particular embodiments, the Fc domain which includes the C_{H}2 and C_{H}3 domains of the heavy chain has an amino acid sequence of SEQ ID NOs: 196, 197, or 198 (Table 6), or a mutant or variant thereof. Exemplary amino acid sequences of the entire constant region (SEQ ID NOs: 103, 105, 107, 109, or 110) comprising C_{H}1 domain, hinge region, C_{H}2 domain, and C_{H}3 domain are also provided in Table 6. Also provided are anti-Tau mAbs which have a murine constant region of Fc domain (for example, an IgG2a Fc domain or the entire IgG2 constant region, SEQ ID NOs: 112 or 113) which may be useful for study in mouse models of disease.

[0179] In certain embodiments, the anti-Tau antigen-binding fragment transgene encodes an Tau antigen-binding fragment comprising a light chain variable domain comprising an amino acid sequence that is at least 85%, 86%, 87%, 88%, 89%, 90%, 91%, 92%, 93%, 94%, 95%, 96%, 97%, 98% or 99% identical to the sequence set forth in SEQ ID NO: 100. In certain embodiments, the anti-Tau antigen-binding fragment transgene encodes an Tau antigen-binding fragment comprising a heavy chain variable domain comprising an amino acid sequence that is at least 85%, 86%, 87%, 88%, 89%, 90%, 91%, 92%, 93%, 94%, 95%, 96%, 97%, 98% or 99% identical to the sequence set forth in SEQ ID NO: 99. In certain embodiments, the anti-Tau antigen-binding fragment transgene encodes an antigen-binding fragment comprising a light chain variable domain comprising an amino acid sequence that is at least 85%, 86%, 87%, 88%, 89%, 90%, 91%, 92%, 93%, 94%, 95%, 96%, 97%, 98% or 99% identical to the sequence set forth in SEQ ID NO: 100 and a heavy chain variable domain comprising an amino acid sequence that is at least 85%, 86%, 87%, 88%, 89%, 90%, 91%, 92%, 93%, 94%, 95%, 96%, 97%, 98% or 99% identical to the sequence set forth in SEQ ID NO: 99. In certain embodiments, the Tau antigen binding fragment comprises a heavy chain variable domain comprising an amino acid sequence of SEQ ID NO: 99 with 1, 2, 3, 4, 5, 6, 7, 8, 9, 10, 11, 12, 13, 14, 15 or more amino acid substitutions, insertions or deletions, and the substitutions, insertions or deletions are made, e.g., in the framework regions (e.g., those regions outside of the CDRs, which CDRs are underlined in FIG. 1E and the sequences set forth in Table 3 (SEQ ID NOs: 160, 161, and 162, being the amino acid sequences of the VH-CDR1, VH-CDR2, and VH-CDR3, respectively)). In certain embodiments, the Tau antigen binding fragment comprises a light chain variable domain comprising an amino acid sequence of SEQ ID NO: 100 with 1, 2, 3, 4, 5, 6, 7, 8, 9, 10, 11, 12, 13, 14, 15 or more amino acid substitutions, insertions or deletions, and the substitutions, insertions or deletions are made, e.g., in the framework regions (e.g., those regions outside of the CDRs, which CDRs are underlined in FIG. 1E and the sequences set forth in Table 3 (SEQ ID NOs: 163, 164, and 165, being the amino acid sequences of the VL-CDR1, VL-CDR2, and VL-CDR3, respectively)). In certain embodiments, the anti-Tau antigen-binding fragment transgene encodes a hyperglycosylated NI-502.31B6 Fab, comprising a heavy chain and a light chain of SEQ ID NOs: 189 and 190, respectively, with one or more of the following mutations: L121N (heavy chain) and/or E201N (light chain).

[0180] In certain embodiments, the anti-Tau antigen binding fragment transgene encodes an antigen binding fragment and comprises the nucleotide sequence encoding the six NI-502.31B6 CDRs, which may be determined readily by those skilled in the art and including those which are underlined in the heavy and light chain variable domain sequences of FIG. 1E (see also Table 3) which are spaced between framework regions, generally human framework regions, and associated with constant domains depending upon the form of the antigen-binding molecule, as is known in the art to form the heavy and/or light chain variable domain of an anti-Tau antibody or antigen-binding fragment thereof. In certain embodiments, the anti-Tau antigen-binding fragment transgene encodes an antigen-binding fragment and comprises the nucleotide sequences encoding the six NI-502.31B6 CDRs (comprising for example, SEQ ID NOs: 160-165) which are underlined in the heavy and light chain variable domain sequences of FIG. 1E which are spaced between framework regions, generally human framework regions, and associated with constant domains depending upon the form of the antigen-binding molecule, as is known in the art to form the heavy and/or light chain variable domain of an anti-Tau antibody or antigen-binding fragment thereof.

[0181] The transgenes provided herein encode an anti-Tau mAb (FIG. 1E), particularly either as a full-length antibody or an antigen binding fragment thereof, e.g. a Fab or Fab′ fragment or a F(ab′)₂, or a synthetic or recombinant form incorporating an antigen-binding domain thereof (such as, for example, an scFv, minibody, diabody, nanobody, scFv-Fc). Exemplary structures of antigen-binding fragments and recombinant forms are depicted in FIG. 1A and exemplary amino acid sequences as well as nucleotide sequences are provided in Tables 2, 5, and 11A-11G respectively.

[0182] Exemplary transgenes that encoding an anti-Tau ScFv-Fc include nucleotide sequences of SEQ ID NOs: 372 or 373. In some embodiments, the transgenes are present in constructs providing an ITR to ITR cassette of SEQ ID NO:372. Exemplary transgenes that represent an anti-Tau Fab or are nucleic acid sequences that encode an anti-Tau Fab are those sequences of SEQ ID NOs: 390 and 391. In some embodiments, the transgenes are present in constructs providing an ITR to ITR cassette with a nucleotide sequence of SEQ ID NO:390.

[0183] In certain embodiments, provided are transgenes that encode the anti-Tau antibody, the anti-Tau antigen-binding fragment or other recombinant anti-Tau antigen-binding form which comprises the nucleotide sequences encoding the heavy and light chains of the variable regions of NI-502.8H1 (8H1) (nucleotide sequences SEQ ID NOs. 5 and 6, respectively, see Table 1). The nucleotide sequences may be codon optimized for expression in human cells. The amino acid sequences of the heavy and light chain variable domains of NI-502.8H1 are provided in Table 2, and, in particular, are SEQ ID NO: 101 (encoding the NI-502.8H1 heavy chain variable portion) and SEQ ID NO: 102 (encoding the NI-502.8H1 light chain variable portion). The transgene may encode heavy and light chain variable domain sequences that have a signal or leader sequence at the N-terminus appropriate for expression and secretion in human cells, in particular, human CNS cells. The signal sequence may have the amino acid sequence of MYRMQLLLLIALSLALVTNS (SEQ ID NO: 87) or a signal sequence listed in Table 9.

[0184] In addition to the heavy and light chain variable domains, the heavy and light chains encoded by the transgene may also comprise C_{H}1 and CL domain sequences, and, in certain embodiments, the transgenes may comprise, at the C-terminus of the heavy chain C_{H}1 domain sequence, all or a portion of the hinge region (see Table 7 for hinge sequences). The C_{H}1-domain may be an IgG1 (SEQ ID NO: 193), IgG2 (SEQ ID NO: 194) or IgG4 (SEQ ID NO: 195) C_{H}1 domain. In some embodiments, the anti-Tau-antigen binding domain has or comprises a heavy chain variable domain of SEQ ID NO: 101, and a C_{H}1 of IgG1 (SEQ ID NO: 193), IgG2 (SEQ ID NO: 194) or IgG4 (SEQ ID NO: 195), or a variant thereof. In certain embodiments, the anti-Tau-antigen binding domain has a heavy chain domain comprising VH and C_{H}1, with the heavy chain consisting of or comprising an amino acid sequence of SEQ ID NOs: 361 (IgG1), 362 (IgG2), or 363 (IgG4) (Table 2) and a light chain consisting of or comprising a VL and a CL with an amino acid sequence of SEQ ID NO: 192 or 368.

[0185] In some embodiments, the anti-Tau-antigen binding domain has a heavy chain variable domain of SEQ ID NO: 101 and a IgG1 C_{H}1 domain sequence (SEQ ID NO: 193) with additional hinge region sequence starting after the C-terminal valine (V), contains all or a portion of the amino acid sequence EP, EPKS, EPKSCDKTHTCPPCPAPELLGG (SEQ ID NO: 172), EPKSCDKTHTCPPCPA(SEQ ID NO: 173), EPKSCDKTHT(SEQ ID NO: 174), EPKSCDKTHLCPPCPAPELLGG (SEQ ID NO: 175), EPKSCDKTHLCPPCPA(SEQ ID NO: 176), EPKSCDKTHL(SEQ ID NO: 177), EPKSCDKTHTCPPCPAPELLGGPSVFL (SEQ ID NO: 178) or EPKSCDKTHLCPPCPAPELLGGPSVFL (SEQ ID NO: 179) as set forth in FIG. 1F. In particular embodiments, the anti-Tau antigen binding domain has a heavy chain comprising a VH, C_{H}1 and all or a portion of the hinge domain with the heavy chain consisting of or comprising an amino acid sequence of SEQ ID NO: 191 and a light chain consisting of or comprising a VL and a CL (for example, a kappa CL) with an amino acid sequence of SEQ ID NO: 192 or 368 (see FIG. 1F and Table 2 for heavy and light chain sequences).

[0186] In other embodiments, the anti-Tau-antigen binding domain has a heavy chain variable domain of SEQ ID NO: 101 and a IgG4 C_{H}1 domain sequence (SEQ ID NOs: 195) with optionally additional hinge region sequence starting after the C-terminal valine (V), contains all or a portion of the amino acid sequence ESKYGPPCPPCPAPEFLGG (SEQ ID NO: 180), and specifically, ES, ESKY, ESKYGPPCPPCPA (SEQ ID NO: 181), ESKYGPPCPSCPA (SEQ ID NO: 182), ESKYGPPCPSCPAPEFLGGPSVFL (SEQ ID NO: 183), or ESKYGPPCPPCPAPEFLGGPSVFL (SEQ ID NO: 184). In other embodiments, the anti-Tau-antigen binding domain has a heavy chain variable domain of SEQ ID NO: 101 and a IgG2 C_{H}1 domain sequence (SEQ ID NO: 194) with additional hinge region sequence starting after the C-terminal valine (V), contains all or a portion of the amino acid sequence ERKCCVECPPCPAPPVAG (SEQ ID NO: 185) or ERKCCVECPPCPA (SEQ ID NO: 186). See also Table 7 for a listing of the amino acid sequences of hinge regions.

[0187] In another embodiment, the transgenes comprise the amino acid sequences encoding the full length (or substantially full length) heavy and light chains of the antibody, that is the heavy chain comprises the VH, C_{H}1 and hinge domain and, in addition, the Fc domain. The Fc domains that may be incorporated into the anti-Tau antibodies encoded by the transgenes described herein are as disclosed in Section 5.2.4, infra. The Fc domain which includes the C_{H}2 and C_{H}3 domains of the heavy chain may be an IgG1 (SEQ ID NO: 196), IgG2 (SEQ ID NO: 197) or IgG4 (SEQ ID NO: 198) Fc domain and may have one or more amino acid modifications that alter Fc effector function (including altered binding to one or more Fc receptors) or increase serum half-life. In particular embodiments, the Fc domain has an amino acid sequence of SEQ ID NOs: 196, 197, or 198 (Table 6), or a mutant or variant thereof. Exemplary amino acid sequences of the entire constant region (SEQ ID NOs: 103, 105, 107, 109, or 110) comprising C_{H}1 domain, hinge region, C_{H}2 domain, and C_{H}3 domain are also provided in Table 6. Also provided are anti-Tau mAbs which have a murine constant region of Fc domain (for example, an IgG2a Fc domain or the entire IgG2 constant region, SEQ ID NOs: 112 or 113) which may be useful for study in mouse models of disease.

[0188] In certain embodiments, the anti-Tau antigen-binding fragment transgene encodes an Tau antigen-binding fragment comprising a light chain variable domain comprising an amino acid sequence that is at least 85%, 86%, 87%, 88%, 89%, 90%, 91%, 92%, 93%, 94%, 95%, 96%, 97%, 98% or 99% identical to the sequence set forth in SEQ ID NO: 102. In certain embodiments, the anti-Tau antigen-binding fragment transgene encodes an Tau antigen-binding fragment comprising a heavy chain variable domain comprising an amino acid sequence that is at least 85%, 86%, 87%, 88%, 89%, 90%, 91%, 92%, 93%, 94%, 95%, 96%, 97%, 98% or 99% identical to the sequence set forth in SEQ ID NO: 101. In certain embodiments, the anti-Tau antigen-binding fragment transgene encodes an antigen-binding fragment comprising a light chain variable domain comprising an amino acid sequence that is at least 85%, 86%, 87%, 88%, 89%, 90%, 91%, 92%, 93%, 94%, 95%, 96%, 97%, 98% or 99% identical to the sequence set forth in SEQ ID NO: 102 and a heavy chain variable domain comprising an amino acid sequence that is at least 85%, 86%, 87%, 88%, 89%, 90%, 91%, 92%, 93%, 94%, 95%, 96%, 97%, 98% or 99% identical to the sequence set forth in SEQ ID NO: 101. In certain embodiments, the Tau antigen binding fragment comprises a heavy chain variable domain comprising an amino acid sequence of SEQ ID NO: 101 with 1, 2, 3, 4, 5, 6, 7, 8, 9, 10, 11, 12, 13, 14, 15 or more amino acid substitutions, insertions or deletions, and the substitutions, insertions or deletions are made, e.g., in the framework regions (e.g., those regions outside of the CDRs, which CDRs are underlined in FIG. 1F and the sequences set forth in Table 3 (SEQ ID NOs: 166, 167, and 168, being the amino acid sequences of the VH-CDR1, VH-CDR2, and VH-CDR3, respectively)). In certain embodiments, the Tau antigen binding fragment comprises a light chain comprising an amino acid sequence of SEQ ID NO: 100 with 1, 2, 3, 4, 5, 6, 7, 8, 9, 10, 11, 12, 13, 14, 15 or more amino acid substitutions, insertions or deletions, and the substitutions, insertions or deletions are made, e.g., in the framework regions (e.g., those regions outside of the CDRs, which CDRs are underlined in FIG. 1F and the sequences set forth in Table 3 (SEQ ID NOs: 169, 170, and 171, being the amino acid sequences of the VL-CDR1, VL-CDR2, and VL-CDR3, respectively)). In certain embodiments, the anti-Tau antigen-binding fragment transgene encodes a hyperglycosylated NI-502.8H1 Fab, comprising a heavy chain and a light chain of SEQ ID NOs: 191 and 192, respectively, with one or more of the following mutations: L117N (heavy chain) and/or Q157N, Q157S, and/or E197N (light chain).

[0189] In certain embodiments, the anti-Tau antigen binding fragment transgene encodes an antigen binding fragment and comprises the nucleotide sequence encoding the six NI-502.8H1 CDRs which may be determined readily by those skilled in the art and including those which are underlined in FIG. 1F (see also Table 3), which are spaced between framework regions, generally human framework regions, and associated with constant domains depending upon the form of the antigen-binding molecule, as is known in the art to form the heavy and/or light chain variable domain of an anti-Tau antibody or antigen-binding fragment thereof. In certain embodiments, the anti-Tau antigen-binding fragment transgene encodes an antigen-binding fragment and comprises the nucleotide sequences encoding the six NI-502.8H1 CDRs (comprising, for example, SEQ ID NOs: 166-171) which are underlined in the heavy and light chain variable domain sequences of FIG. 1F which are spaced between framework regions, generally human framework regions, and associated with constant domains depending upon the form of the antigen-binding molecule, as is known in the art to form the heavy and/or light chain variable domain of an anti-Tau antibody or antigen-binding fragment thereof.

[0190] The transgenes provided herein encode an anti-Tau mAb (FIG. 1F), particularly either as a full-length antibody or an antigen binding fragment thereof, e.g. a Fab or Fab′ fragment or a F(ab′)₂, or a synthetic or recombinant form incorporating an antigen-binding domain thereof (such as, for example, an scFv, minibody, diabody, nanobody, scFv-Fc). Exemplary structures of antigen-binding fragments and recombinant forms are depicted in FIG. 1A and exemplary amino acid sequences as well as nucleotide sequences are provided in Tables 2, 5, and 11A-11G, respectively.

[0191] Exemplary transgenes that encode an anti-Tau Fab include nucleotide sequences of SEQ ID NOs: 384 and 385. In some embodiments, the transgenes are present in constructs providing an AAV artificial genome ITR to ITR cassette of SEQ ID NO: 384.

### 5.2.3. Vectored Antibody Constructs

[0192] The recombinant expression cassettes provided herein comprise the following components: (1) AAV inverted terminal repeats that flank the expression cassette; (2) regulatory control elements, which include a) a promoter, b) optionally an intron and c) a poly A signal; and (3) nucleic acid sequences coding for the heavy chain and light chain of a Tau-specific mAb or antigen-binding fragments thereof or a recombinant antigen-binding protein, such as the heavy and light chains of a full length antibody, a Fab fragment, an scFv, an scFv-Fc, or other recombinant antigen binding form as described herein. Nucleotide sequences of exemplary regulatory sequences are provided in Table 8. In some embodiments, the nucleic acid regulatory control element is operably linked to a composite transgene. The composite transgene comprises a heavy chain antibody sequence linked to a 5′ leader (signal) sequence, a linker (for example, an IRES or cleavable linker as disclosed herein), and a light chain antibody sequence linked to a 5′ leader (signal) sequence. In some embodiments, the heavy chain antibody sequence comprises a full or partial heavy chain constant region (e.g., comprising a heavy chain variable domain and optionally a C_{H}1 domain. In some embodiments, the light chain antibody sequence comprises a full or partial light chain constant region (e.g., comprising a light chain variable domain and optionally a light chain constant domain). The expression cassette may comprise any combination of one of the genes or nucleic acids, including one or more nucleic acids from Tables 1, 11D, 11E, 11F, or 11G, encoding the therapeutic proteins, with amino acid sequences listed in, but not limited to, Tables 2, 11A, 11B, or 11C. Exemplary expression cassettes are depicted in FIGS. 1B and C, and the amino acid sequences of expressed transgenes are provided in FIGS. 1D-1F.

[0193] In an aspect of the invention, various regulatory elements and combinations of elements, such as linkers (see Table 8 infra), were utilized to design and generate nucleic acid expression cassettes for expression of the composite antibody sequences, which are listed in Table 5 for the full length antibodies. See also Tables 11F and 11G for constructs encoding scFv-Fcs and Fab fragments.

TABLE 5
Composite Antibody Transgene Nucleic Acids

| | SEQ | |
|---|---|---|
| Name | ID NO: | Nucleic Acid Sequence |
| 4P3 IgG2a | 7 | ATGTACAGAATGCAGCTGCTGCTGCTCATTGCCCTGTCTCTGGCCCT |
| Leader- | | GGTCACCAATTCTGAGGTGCAGCTGGTGCAGTCTGGGGCTGAAGTGA |
| 4P3chim. HC- | | AGAAGCCTGGGGAGAGCCTGAAGATCAGCTGCAAAGTGTCTGGCTAT |
| furin/T2A- | | GACTTCAGCAAGTACTGGATTGGCTGGGTCAGACAGATGCCTGGCAA |
| Leader-4P3.LC | | AGGCCTGGAATGGATGGGACTGATCTACCCTGGGGACTCTGACACCA |
| (HC = mIgG2a) | | GATACAGCCCTAGCCTGGAAGGCCAGGTGTCCATCTCTGCTGACAAG |
| (LC = kappa) | | AGCATCTCTGCAGCCTACCTGCAGTTCAGCAGCCTGAAGGCCTCTGA |
| | | CTCTGCCATGTACTACTGTGTCAGAAAGGGCTACTCTGCCTACCTTG |
| | | GAGGATGGTTTGATCCTTGGGGCCAGGGCACACTGGTCACAGTGTCC |
| | | TCTGCTAAGACAACAGCCCCTTCTGTGTACCCTCTGGCTCCTGTGTG |
| | | TGGGGACACAACAGGATCCTCTGTGACACTGGGCTGCCTGGTCAAGG |
| | | GATACTTCCCTGAGCCAGTGACACTGACCTGGAACTCTGGATCTCTG |
| | | TCCTCTGGGGTGCACACATTCCCTGCTGTGCTGCAGTCTGACCTGTA |
| | | CACCCTGAGCAGCAGTGTGACAGTGACCAGCAGCACATGGCCCAGCC |
| | | AGAGCATCACCTGTAATGTGGCTCACCCTGCCAGCTCCACCAAGGTG |
| | | GACAAGAAGATTGAGCCTAGAGGCCCCACCATCAAGCCCTGTCCTCC |
| | | ATGCAAGTGTCCTGCTCCTAACCTGCTTGGAGGCCCCTCTGTGTTCA |
| | | TCTTCCCACCTAAGATCAAGGATGTGCTGATGATCTCTCTGAGCCCC |
| | | ATTGTGACCTGTGTGGTGGTGGATGTGTCTGAGGATGACCCTGATGT |
| | | GCAGATCTCTTGGTTTGTGAACAATGTGGAAGTGCACACAGCCCAGA |
| | | CACAGACCCACAGAGAGGACTACAACAGCACCCTGAGAGTGGTGTCT |
| | | GCCCTGCCTATCCAGCACCAGGACTGGATGAGTGGCAAAGAGTTCAA |
| | | GTGCAAAGTGAACAACAAGGACCTGCCTGCTCCAATTGAGAGAACCA |
| | | TCAGCAAGCCCAAGGGCTCTGTTAGAGCCCCTCAAGTGTATGTGCTG |
| | | CCTCCACCTGAGGAAGAGATGACCAAGAAACAAGTGACCCTGACATG |
| | | CATGGTCACAGACTTCATGCCTGAGGACATCTATGTGGAATGGACCA |
| | | ACAATGGCAAGACAGAGCTGAACTACAAGAACACTGAGCCTGTGCTG |
| | | GACTCTGATGGCAGCTACTTCATGTACAGCAAGCTGAGGGTTGAGAA |
| | | GAAGAACTGGGTTGAGAGAAACAGCTACAGCTGCTCTGTGGTGCATG |
| | | AGGGCCTGCACAATCACCACACCACCAAGAGCTTCAGCAGAACCCCT |
| | | GGCAAGAGAAAGAGAAGAGGCTCTGGAGAAGGCAGAGGCTCCCTGCT |
| | | GACATGTGGGGATGTTGAAGAGAATCCTGGGCCTATGTATAGGATGC |
| | | AACTGCTCCTCCTGATTGCTCTGAGCCTGGCTCTTGTGACCAACTCT |
| | | GACATCCAGCTGACACAGAGCCCTGACAGCCTGGCTGCTTCTCTGGG |
| | | AGAGAGAGTGACCATCAACTGCAGAAGCTCCCAGAACATCTTCTACA |
| | | ACAGCAACAACAAGAACTTCCTGGCCTGGTATCAGCAGAAGGCTGGC |
| | | CAGTCTCCTAAGCTGCTGATCTACTGGGCCAGCACCAGAGAATCTGG |
| | | GGTGCCAGATAGATTTTCTGGCAGTGGCTCTGGCACAGACTTCACCC |
| | | TGACAATCAGTGGACTGCAGGCTGGGGATGTTGCTGTGTACTTCTGC |
| | | CAGCAGTACTTCACAGATGCCCCTACCTTTGGTGGTGGCACCAAGGT |
| | | GGAAATCAAGAGGGCTGATGCTGCCCCTACAGTGTCTATCTTCCCAC |
| | | CTAGCTCTGAGCAGCTGACCAGTGGTGGTGCCTCTGTTGTGTGCTTC |
| | | CTGAACAACTTCTACCCCAAGGACATCAATGTGAAGTGGAAGATTGA |
| | | TGGCTCTGAGAGGCAGAATGGGGTGCTGAACAGCTGGACAGACCAGG |
| | | ACAGCAAGGACTCCACCTACAGCATGAGCAGCACACTGACCCTGACC |
| | | AAGGATGAGTATGAGAGGCACAACAGCTACACCTGTGAAGCCACACA |
| | | CAAGACCAGCACAAGCCCCATTGTGAAGTCCTTCAACAGAAATGAGT |
| | | GTTAA |
| 31B6 IgG2a | 8 | ATGTACAGAATGCAGCTGCTGCTGCTCATTGCCCTGTCTCTGGCCCT |
| Leader- | | GGTCACCAATTCTGAGGTGCAGCTGCTGCAGAGTGGTGGTGGTGTTG |
| 31B6.chim.HC- | | TGCAGCCTGGTGGCTCTCTGAGACTGTCTTGTGAAGCCTCTGGCTTC |
| furin/T2A- | | ACCTTCAGCAGCTACAGCATGCACTGGGTCAGACAGGCCCCTGGCAA |
| Leader-31B6.LC | | AGGACTGGAATGGCTGACCCTGATCAGCTACAATGGGGTCAACAAGT |
| (HC = mIgG2a) | | ACTATGCCAAGTCTGTGAAGGGCAGATTTGCCATCAGCAGAGATGAC |
| (LC = lambda) | | AGCAAGTCTACCCTGTTCCTGCAGATGAACAGCCTGACCACAGATGA |
| | | CACTGCTGTGTACTACTGTGCCAGATGTCCCATTCCTAGAGCTGCCA |
| | | GCTACAGAAATGGGGACAACTACTTTGAGTTTGGCCAGGGCACCCTG |
| | | GTCACAGTGTCCTCTGCTAAGACAACAGCCCCTTCTGTGTACCCTCT |
| | | GGCTCCTGTGTGTGGGGACACAACAGGATCCTCTGTGACACTGGGCT |
| | | GCCTGGTCAAGGGCTACTTTCCTGAGCCAGTGACACTGACCTGGAAC |
| | | TCTGGATCTCTGTCCTCTGGGGTGCACACATTCCCTGCTGTGCTGCA |
| | | GTCTGACCTGTACACCCTGAGCAGCAGTGTGACAGTGACCAGCAGCA |
| | | CATGGCCCAGCCAGAGCATCACCTGTAATGTGGCTCACCCTGCCAGC |
| | | TCCACCAAGGTGGACAAGAAGATTGAGCCTAGAGGCCCCACCATCAA |
| | | GCCCTGTCCTCCATGCAAGTGTCCTGCTCCTAACCTGCTTGGAGGCC |
| | | CCTCTGTGTTCATCTTCCCACCTAAGATCAAGGATGTGCTGATGATC |
| | | TCTCTGAGCCCCATTGTGACCTGTGTGGTGGTTGATGTGTCTGAGGA |
| | | TGACCCAGATGTGCAGATCTCTTGGTTTGTGAACAATGTGGAAGTGC |
| | | ACACAGCCCAGACACAGACCCACAGAGAGGACTACAACAGCACCCTG |
| | | AGAGTGGTGTCTGCCCTGCCTATCCAGCACCAGGACTGGATGTCTGG |
| | | CAAAGAGTTCAAGTGCAAAGTGAACAACAAGGACCTGCCTGCTCCAA |
| | | TTGAGAGAACCATCAGCAAGCCCAAGGGCTCTGTTAGAGCCCCTCAA |
| | | GTGTATGTGCTGCCTCCACCTGAGGAAGAGATGACCAAGAAACAAGT |
| | | GACCCTGACATGCATGGTCACTGACTTCATGCCTGAGGACATCTATG |
| | | TGGAATGGACCAACAATGGCAAGACAGAGCTGAACTACAAGAACACT |
| | | GAGCCTGTGCTGGACTCTGATGGCAGCTACTTCATGTACAGCAAGCT |
| | | GAGGGTTGAGAAGAAGAACTGGGTTGAGAGAAACAGCTACTCCTGCT |
| | | CTGTGGTGCATGAGGGCCTGCACAACCATCACACCACAAAGAGCTTC |
| | | AGCAGAACCCCAGGCAAGAGAAAGAGAAGAGGCTCTGGAGAAGGCAG |
| | | AGGCTCCCTGCTGACATGTGGGGATGTTGAAGAGAATCCTGGGCCTA |
| | | TGTATAGGATGCAACTGCTCCTCCTGATTGCTCTGAGCCTGGCTCTT |
| | | GTGACCAACTCTCAGGCTGTGGTCACCCAAGAGCCTAGCCTGTCTGT |
| | | GTCTCCTGGTGGCACAGTGACACTGACATGTGCCCTGTCCTCTGCCT |
| | | CTGTGTCTACCAGCAGCTACCCCAGCTGGTATCAGCAGACACCTGGC |
| | | CAGCCTCCAAGAATGCTGATCCACAACACAGACACCAGATCCTCTGG |
| | | GGTGCCAGACAGATTCTCTGGCAGCATCCTGGGCAAGAAGGCTGCCC |
| | | TGACAATCACTGGTGCCCAGGCTGATGATGAGTCTGACTACTACTGT |
| | | GTGGTGTACCTTGGCAATGGCTTCTGGGTGTTTGGTGGTGGCACCAA |
| | | GCTGACAGTGCTGGGCCAGCCTAAAAGCAGCCCCTCTGTGACACTGT |
| | | TCCCTCCAAGCTCTGAGGAACTGGAAACAAACAAGGCCACACTTGTG |
| | | TGCACCATCACAGACTTCTACCCTGGGGTTGTGACAGTGGACTGGAA |
| | | AGTGGATGGCACCCCTGTGACACAAGGCATGGAAACCACACAGCCCA |
| | | GCAAGCAGAGCAACAACAAGTACATGGCCAGCTCCTATCTGACCCTG |
| | | ACAGCCAGAGCCTGGGAGAGACACAGCTCTTACAGCTGCCAAGTGAC |
| | | CCATGAGGGCCACACAGTGGAAAAGAGCCTGAGCAGAGCTGACTGCT |
| | | CTTAA |
| 8H1 IgG2a | 9 | ATGTACAGAATGCAGCTGCTGCTGCTCATTGCCCTGTCTCTGGCCCT |
| Leader- | | GGTCACCAATTCTGAGGTGCAGCTGGTGGAAAGTGGTGGTGGACTGG |
| 8H1.chim.HC.- | | TTCAGCCTGGTGGCAGCCTGAGACTGTCTTGTGCTGCCTCTGGCTTC |
| furin/T2A- | | ACCTTCAGCATCTACACCATGAGCTGGGTCAGACAGGCTCCTGGCAA |
| Leader-8H1.LC | | AGGCCTGGAATGGGTGTCAGCTATCCTGTCTGATGGCAGCACCTACT |
| (HC = mIgG2a) | | ATGCTGACTCTGTGGAAGGCAGATTCACCATCAGCAGAGACAACAGC |
| (LC = kappa) | | AAGACCACACTGTACCTGCAGATGAACAGCCTGACAGCTGAGGACAC |
| | | TGCTGTGTACTACTGCACCAAGAGAGTGGAAGGCTCCTTCAGAGGCT |
| | | GGGGACAGGGAACACTGGTCACTGTGTCCTCTGCCAAGACAACTGCC |
| | | CCTTCTGTGTACCCTCTGGCTCCTGTGTGTGGGGACACAACAGGATC |
| | | CTCTGTGACACTGGGCTGCCTGGTCAAGGGCTACTTTCCTGAGCCAG |
| | | TGACACTGACCTGGAACTCTGGATCTCTGTCCTCTGGGGTGCACACA |
| | | TTCCCTGCTGTGCTGCAGTCTGACCTGTACACCCTGAGCAGCTCTGT |
| | | GACTGTGACCAGCAGCACATGGCCCAGCCAGAGCATCACCTGTAATG |
| | | TGGCTCACCCTGCCAGCTCCACCAAGGTGGACAAGAAGATTGAGCCT |
| | | AGAGGCCCCACCATCAAGCCCTGTCCTCCATGCAAGTGTCCTGCTCC |
| | | TAACCTGCTTGGAGGCCCCTCTGTGTTCATCTTCCCACCTAAGATCA |
| | | AGGATGTGCTGATGATCTCTCTGAGCCCCATTGTGACCTGTGTGGTG |
| | | GTTGATGTGTCTGAGGATGACCCTGATGTGCAGATCTCTTGGTTTGT |
| | | GAACAATGTGGAAGTGCACACAGCCCAGACACAGACCCACAGAGAGG |
| | | ACTACAACAGCACCCTGAGAGTGGTGTCTGCCCTGCCTATCCAGCAC |
| | | CAGGACTGGATGTCTGGCAAAGAGTTCAAGTGCAAAGTGAACAACAA |
| | | GGACCTGCCTGCTCCAATTGAGAGAACCATCTCCAAGCCTAAGGGCT |
| | | CTGTCAGGGCCCCTCAAGTGTATGTGCTGCCACCTCCTGAGGAAGAG |
| | | ATGACCAAGAAACAAGTGACCCTGACATGCATGGTCACAGACTTCAT |
| | | GCCTGAGGACATCTATGTGGAATGGACCAACAATGGCAAGACAGAGC |
| | | TGAACTACAAGAACACTGAGCCTGTGCTGGACTCTGATGGCTCCTAC |
| | | TTCATGTACAGCAAGCTGAGGGTTGAGAAGAAGAACTGGGTTGAGAG |
| | | AAACAGCTACAGCTGCTCTGTGGTGCATGAGGGCCTGCACAATCACC |
| | | ACACCACCAAGAGCTTCAGCAGAACCCCTGGCAAGAGAAAGAGAAGA |
| | | GGCTCTGGAGAAGGCAGAGGCTCCCTGCTGACATGTGGGGATGTTGA |
| | | AGAGAATCCTGGGCCTATGTATAGGATGCAACTGCTCCTCCTGATTG |
| | | CTCTGAGCCTGGCTCTTGTGACCAACTCTGAGATTGTGATGACACAG |
| | | AGCCCTGGCACACTGTCTCTGAGCCCTGGGGAATCTGCCACACTGAG |
| | | CTGTAGAGCCAGCCAGTCTGTGTCTACCACCTACCTGGCCTGGTATC |
| | | AGCAGAAGCCTGGACAGGCTCCCAGACTGCTGATCTATGGGGCCTCT |
| | | TCTAGAGCCACAGGCATCCCTGACAGATTTTCTGGCAGTGGCTCTGG |
| | | CACAGACTTCACCCTGACCATCAGCAGACTGGAACCTGAGGACTTTG |
| | | CTGTGTACTACTGCCAGCAGTATGGTGGCAGCAGGCTGATCACATTT |
| | | GGCCAGGGCACAAGACTGGAAATCAAGAGGGCTGATGCTGCCCCTAC |
| | | AGTGTCTATCTTCCCACCTAGCTCTGAGCAGCTGACCAGTGGTGGTG |
| | | CCTCTGTTGTGTGCTTCCTGAACAACTTCTACCCCAAGGACATCAAT |
| | | GTGAAGTGGAAGATTGATGGCTCTGAGAGGCAGAATGGGGTGCTGAA |
| | | CAGCTGGACAGACCAGGACAGCAAGGACTCCACCTACAGCATGAGCA |
| | | GCACCCTGACACTGACCAAGGATGAGTATGAGAGGCACAACAGCTAC |
| | | ACCTGTGAAGCCACACACAAGACCAGCACAAGCCCCATTGTGAAGTC |
| | | CTTCAACAGAAATGAGTGTTAA |
| 4P3 IgG2a | 10 | ATGTACAGAATGCAGCTGCTGCTGCTCATTGCCCTGTCTCTGGCCCT |
| LALAPG | | GGTCACCAATTCTGAGGTGCAGCTGGTGCAGTCTGGGGCTGAAGTGA |
| Leader- | | AGAAGCCTGGGGAGAGCCTGAAGATCAGCTGCAAAGTGTCTGGCTAT |
| 4P3chim.HC. | | GACTTCAGCAAGTACTGGATTGGCTGGGTCAGACAGATGCCTGGCAA |
| LALAPGmut- | | AGGCCTGGAATGGATGGGACTGATCTACCCTGGGGACTCTGACACCA |
| furin/T2A- | | GATACAGCCCTAGCCTGGAAGGCCAGGTGTCCATCTCTGCTGACAAG |
| Leader-4P3.LC | | AGCATCTCTGCAGCCTACCTGCAGTTCAGCAGCCTGAAGGCCTCTGA |
| (HC = mut | | CTCTGCCATGTACTACTGTGTCAGAAAGGGCTACTCTGCCTACCTTG |
| mIgG2a) | | GAGGATGGTTTGATCCTTGGGGCCAGGGCACACTGGTCACAGTGTCC |
| (LC = kappa) | | TCTGCTAAGACAACAGCCCCTTCTGTGTACCCTCTGGCTCCTGTGTG |
| | | TGGGGACACAACAGGATCCTCTGTGACACTGGGCTGCCTGGTCAAGG |
| | | GATACTTCCCTGAGCCAGTGACACTGACCTGGAACTCTGGATCTCTG |
| | | TCCTCTGGGGTGCACACATTCCCTGCTGTGCTGCAGTCTGACCTGTA |
| | | CACCCTGAGCAGCAGTGTGACAGTGACCAGCAGCACATGGCCCAGCC |
| | | AGAGCATCACCTGTAATGTGGCTCACCCTGCCAGCTCCACCAAGGTG |
| | | GACAAGAAGATTGAGCCTAGAGGCCCCACCATCAAGCCCTGTCCTCC |
| | | ATGCAAGTGTCCTGCTCCTAACGCTGCCGGAGGCCCCTCTGTGTTCA |
| | | TCTTCCCACCTAAGATCAAGGATGTGCTGATGATCTCTCTGAGCCCC |
| | | ATTGTGACCTGTGTGGTGGTGGATGTGTCTGAGGATGACCCTGATGT |
| | | GCAGATCTCTTGGTTTGTGAACAATGTGGAAGTGCACACAGCCCAGA |
| | | CACAGACCCACAGAGAGGACTACAACAGCACCCTGAGAGTGGTGTCT |
| | | GCCCTGCCTATCCAGCACCAGGACTGGATGAGTGGCAAAGAGTTCAA |
| | | GTGCAAAGTGAACAACAAGGACCTGGGCGCTCCAATTGAGAGAACCA |
| | | TCAGCAAGCCCAAGGGCTCTGTTAGAGCCCCTCAAGTGTATGTGCTG |
| | | CCTCCACCTGAGGAAGAGATGACCAAGAAACAAGTGACCCTGACATG |
| | | CATGGTCACAGACTTCATGCCTGAGGACATCTATGTGGAATGGACCA |
| | | ACAATGGCAAGACAGAGCTGAACTACAAGAACACTGAGCCTGTGCTG |
| | | GACTCTGATGGCAGCTACTTCATGTACAGCAAGCTGAGGGTTGAGAA |
| | | GAAGAACTGGGTTGAGAGAAACAGCTACAGCTGCTCTGTGGTGCATG |
| | | AGGGCCTGCACAATCACCACACCACCAAGAGCTTCAGCAGAACCCCT |
| | | GGCAAGAGAAAGAGAAGAGGCTCTGGAGAAGGCAGAGGCTCCCTGCT |
| | | GACATGTGGGGATGTTGAAGAGAATCCTGGGCCTATGTATAGGATGC |
| | | AACTGCTCCTCCTGATTGCTCTGAGCCTGGCTCTTGTGACCAACTCT |
| | | GACATCCAGCTGACACAGAGCCCTGACAGCCTGGCTGCTTCTCTGGG |
| | | AGAGAGAGTGACCATCAACTGCAGAAGCTCCCAGAACATCTTCTACA |
| | | ACAGCAACAACAAGAACTTCCTGGCCTGGTATCAGCAGAAGGCTGGC |
| | | CAGTCTCCTAAGCTGCTGATCTACTGGGCCAGCACCAGAGAATCTGG |
| | | GGTGCCAGATAGATTTTCTGGCAGTGGCTCTGGCACAGACTTCACCC |
| | | TGACAATCAGTGGACTGCAGGCTGGGGATGTTGCTGTGTACTTCTGC |
| | | CAGCAGTACTTCACAGATGCCCCTACCTTTGGTGGTGGCACCAAGGT |
| | | GGAAATCAAGAGGGCTGATGCTGCCCCTACAGTGTCTATCTTCCCAC |
| | | CTAGCTCTGAGCAGCTGACCAGTGGTGGTGCCTCTGTTGTGTGCTTC |
| | | CTGAACAACTTCTACCCCAAGGACATCAATGTGAAGTGGAAGATTGA |
| | | TGGCTCTGAGAGGCAGAATGGGGTGCTGAACAGCTGGACAGACCAGG |
| | | ACAGCAAGGACTCCACCTACAGCATGAGCAGCACACTGACCCTGACC |
| | | AAGGATGAGTATGAGAGGCACAACAGCTACACCTGTGAAGCCACACA |
| | | CAAGACCAGCACAAGCCCCATTGTGAAGTCCTTCAACAGAAATGAGT |
| | | GTTAA |
| 31B6 IgG2a | 11 | ATGTACAGAATGCAGCTGCTGCTGCTCATTGCCCTGTCTCTGGCCCT |
| LALAPG | | GGTCACCAATTCTGAGGTGCAGCTGCTGCAGAGTGGTGGTGGTGTTG |
| Leader- | | TGCAGCCTGGTGGCTCTCTGAGACTGTCTTGTGAAGCCTCTGGCTTC |
| 31B6.chim.HC. | | ACCTTCAGCAGCTACAGCATGCACTGGGTCAGACAGGCCCCTGGCAA |
| LALAPGmut- | | AGGACTGGAATGGCTGACCCTGATCAGCTACAATGGGGTCAACAAGT |
| furin/T2A- | | ACTATGCCAAGTCTGTGAAGGGCAGATTTGCCATCAGCAGAGATGAC |
| Leader-31B6.LC | | AGCAAGTCTACCCTGTTCCTGCAGATGAACAGCCTGACCACAGATGA |
| (HC = mut | | CACTGCTGTGTACTACTGTGCCAGATGTCCCATTCCTAGAGCTGCCA |
| mIgG2a) | | GCTACAGAAATGGGGACAACTACTTTGAGTTTGGCCAGGGCACCCTG |
| (LC = lambda) | | GTCACAGTGTCCTCTGCTAAGACAACAGCCCCTTCTGTGTACCCTCT |
| | | GGCTCCTGTGTGTGGGGACACAACAGGATCCTCTGTGACACTGGGCT |
| | | GCCTGGTCAAGGGCTACTTTCCTGAGCCAGTGACACTGACCTGGAAC |
| | | TCTGGATCTCTGTCCTCTGGGGTGCACACATTCCCTGCTGTGCTGCA |
| | | GTCTGACCTGTACACCCTGAGCAGCAGTGTGACAGTGACCAGCAGCA |
| | | CATGGCCCAGCCAGAGCATCACCTGTAATGTGGCTCACCCTGCCAGC |
| | | TCCACCAAGGTGGACAAGAAGATTGAGCCTAGAGGCCCCACCATCAA |
| | | GCCCTGTCCTCCATGCAAGTGTCCTGCTCCTAACGCTGCCGGAGGCC |
| | | CCTCTGTGTTCATCTTCCCACCTAAGATCAAGGATGTGCTGATGATC |
| | | TCTCTGAGCCCCATTGTGACCTGTGTGGTGGTTGATGTGTCTGAGGA |
| | | TGACCCAGATGTGCAGATCTCTTGGTTTGTGAACAATGTGGAAGTGC |
| | | ACACAGCCCAGACACAGACCCACAGAGAGGACTACAACAGCACCCTG |
| | | AGAGTGGTGTCTGCCCTGCCTATCCAGCACCAGGACTGGATGTCTGG |
| | | CAAAGAGTTCAAGTGCAAAGTGAACAACAAGGACCTGGGAGCTCCAA |
| | | TTGAGAGAACCATCAGCAAGCCCAAGGGCTCTGTTAGAGCCCCTCAA |
| | | GTGTATGTGCTGCCTCCACCTGAGGAAGAGATGACCAAGAAACAAGT |
| | | GACCCTGACATGCATGGTCACTGACTTCATGCCTGAGGACATCTATG |
| | | TGGAATGGACCAACAATGGCAAGACAGAGCTGAACTACAAGAACACT |
| | | GAGCCTGTGCTGGACTCTGATGGCAGCTACTTCATGTACAGCAAGCT |
| | | GAGGGTTGAGAAGAAGAACTGGGTTGAGAGAAACAGCTACTCCTGCT |
| | | CTGTGGTGCATGAGGGCCTGCACAACCATCACACCACAAAGAGCTTC |
| | | AGCAGAACCCCAGGCAAGAGAAAGAGAAGAGGCTCTGGAGAAGGCAG |
| | | AGGCTCCCTGCTGACATGTGGGGATGTTGAAGAGAATCCTGGGCCTA |
| | | TGTATAGGATGCAACTGCTCCTCCTGATTGCTCTGAGCCTGGCTCTT |
| | | GTGACCAACTCTCAGGCTGTGGTCACCCAAGAGCCTAGCCTGTCTGT |
| | | GTCTCCTGGTGGCACAGTGACACTGACATGTGCCCTGTCCTCTGCCT |
| | | CTGTGTCTACCAGCAGCTACCCCAGCTGGTATCAGCAGACACCTGGC |
| | | CAGCCTCCAAGAATGCTGATCCACAACACAGACACCAGATCCTCTGG |
| | | GGTGCCAGACAGATTCTCTGGCAGCATCCTGGGCAAGAAGGCTGCCC |
| | | TGACAATCACTGGTGCCCAGGCTGATGATGAGTCTGACTACTACTGT |
| | | GTGGTGTACCTTGGCAATGGCTTCTGGGTGTTTGGTGGTGGCACCAA |
| | | GCTGACAGTGCTGGGCCAGCCTAAAAGCAGCCCCTCTGTGACACTGT |
| | | TCCCTCCAAGCTCTGAGGAACTGGAAACAAACAAGGCCACACTTGTG |
| | | TGCACCATCACAGACTTCTACCCTGGGGTTGTGACAGTGGACTGGAA |
| | | AGTGGATGGCACCCCTGTGACACAAGGCATGGAAACCACACAGCCCA |
| | | GCAAGCAGAGCAACAACAAGTACATGGCCAGCTCCTATCTGACCCTG |
| | | ACAGCCAGAGCCTGGGAGAGACACAGCTCTTACAGCTGCCAAGTGAC |
| | | CCATGAGGGCCACACAGTGGAAAAGAGCCTGAGCAGAGCTGACTGCT |
| | | CTTAA |
| 8H1 IgG2a | 12 | ATGTACAGAATGCAGCTGCTGCTGCTCATTGCCCTGTCTCTGGCCCT |
| LALAPG | | GGTCACCAATTCTGAGGTGCAGCTGGTGGAAAGTGGTGGTGGACTGG |
| Leader- | | TTCAGCCTGGTGGCAGCCTGAGACTGTCTTGTGCTGCCTCTGGCTTC |
| 8H1.chim.HC. | | ACCTTCAGCATCTACACCATGAGCTGGGTCAGACAGGCTCCTGGCAA |
| LALAPGmut- | | AGGCCTGGAATGGGTGTCAGCTATCCTGTCTGATGGCAGCACCTACT |
| furin/T2A- | | ATGCTGACTCTGTGGAAGGCAGATTCACCATCAGCAGAGACAACAGC |
| Leader-8H1.LC | | AAGACCACACTGTACCTGCAGATGAACAGCCTGACAGCTGAGGACAC |
| (HC = mut | | TGCTGTGTACTACTGCACCAAGAGAGTGGAAGGCTCCTTCAGAGGCT |
| mIgG2a) | | GGGGACAGGGAACACTGGTCACTGTGTCCTCTGCCAAGACAACTGCC |
| (LC = kappa) | | CCTTCTGTGTACCCTCTGGCTCCTGTGTGTGGGGACACAACAGGATC |
| | | CTCTGTGACACTGGGCTGCCTGGTCAAGGGCTACTTTCCTGAGCCAG |
| | | TGACACTGACCTGGAACTCTGGATCTCTGTCCTCTGGGGTGCACACA |
| | | TTCCCTGCTGTGCTGCAGTCTGACCTGTACACCCTGAGCAGCTCTGT |
| | | GACTGTGACCAGCAGCACATGGCCCAGCCAGAGCATCACCTGTAATG |
| | | TGGCTCACCCTGCCAGCTCCACCAAGGTGGACAAGAAGATTGAGCCT |
| | | AGAGGCCCCACCATCAAGCCCTGTCCTCCATGCAAGTGTCCTGCTCC |
| | | TAACGCCGCTGGAGGCCCCTCTGTGTTCATCTTCCCACCTAAGATCA |
| | | AGGATGTGCTGATGATCTCTCTGAGCCCCATTGTGACCTGTGTGGTG |
| | | GTTGATGTGTCTGAGGATGACCCTGATGTGCAGATCTCTTGGTTTGT |
| | | GAACAATGTGGAAGTGCACACAGCCCAGACACAGACCCACAGAGAGG |
| | | ACTACAACAGCACCCTGAGAGTGGTGTCTGCCCTGCCTATCCAGCAC |
| | | CAGGACTGGATGTCTGGCAAAGAGTTCAAGTGCAAAGTGAACAACAA |
| | | GGACCTGGGAGCTCCAATTGAGAGAACCATCTCCAAGCCTAAGGGCT |
| | | CTGTCAGGGCCCCTCAAGTGTATGTGCTGCCACCTCCTGAGGAAGAG |
| | | ATGACCAAGAAACAAGTGACCCTGACATGCATGGTCACAGACTTCAT |
| | | GCCTGAGGACATCTATGTGGAATGGACCAACAATGGCAAGACAGAGC |
| | | TGAACTACAAGAACACTGAGCCTGTGCTGGACTCTGATGGCTCCTAC |
| | | TTCATGTACAGCAAGCTGAGGGTTGAGAAGAAGAACTGGGTTGAGAG |
| | | AAACAGCTACAGCTGCTCTGTGGTGCATGAGGGCCTGCACAATCACC |
| | | ACACCACCAAGAGCTTCAGCAGAACCCCTGGCAAGAGAAAGAGAAGA |
| | | GGCTCTGGAGAAGGCAGAGGCTCCCTGCTGACATGTGGGGATGTTGA |
| | | AGAGAATCCTGGGCCTATGTATAGGATGCAACTGCTCCTCCTGATTG |
| | | CTCTGAGCCTGGCTCTTGTGACCAACTCTGAGATTGTGATGACACAG |
| | | AGCCCTGGCACACTGTCTCTGAGCCCTGGGGAATCTGCCACACTGAG |
| | | CTGTAGAGCCAGCCAGTCTGTGTCTACCACCTACCTGGCCTGGTATC |
| | | AGCAGAAGCCTGGACAGGCTCCCAGACTGCTGATCTATGGGGCCTCT |
| | | TCTAGAGCCACAGGCATCCCTGACAGATTTTCTGGCAGTGGCTCTGG |
| | | CACAGACTTCACCCTGACCATCAGCAGACTGGAACCTGAGGACTTTG |
| | | CTGTGTACTACTGCCAGCAGTATGGTGGCAGCAGGCTGATCACATTT |
| | | GGCCAGGGCACAAGACTGGAAATCAAGAGGGCTGATGCTGCCCCTAC |
| | | AGTGTCTATCTTCCCACCTAGCTCTGAGCAGCTGACCAGTGGTGGTG |
| | | CCTCTGTTGTGTGCTTCCTGAACAACTTCTACCCCAAGGACATCAAT |
| | | GTGAAGTGGAAGATTGATGGCTCTGAGAGGCAGAATGGGGTGCTGAA |
| | | CAGCTGGACAGACCAGGACAGCAAGGACTCCACCTACAGCATGAGCA |
| | | GCACCCTGACACTGACCAAGGATGAGTATGAGAGGCACAACAGCTAC |
| | | ACCTGTGAAGCCACACACAAGACCAGCACAAGCCCCATTGTGAAGTC |
| | | CTTCAACAGAAATGAGTGTTAA |
| 4P3 IgG1 | 13 | ATGTACAGAATGCAGCTGCTGCTGCTCATTGCCCTGTCTCTGGCCCT |
| Leader- | | GGTCACCAATTCTGAAGTGCAGCTGGTGCAGTCTGGGGCTGAAGTGA |
| 4P3hum.HC- | | AGAAGCCTGGGGAGAGCCTGAAGATCAGCTGCAAAGTGTCTGGCTAT |
| furin/T2A- | | GACTTCAGCAAGTACTGGATTGGCTGGGTCAGACAGATGCCTGGCAA |
| Leader-4P3.LC | | AGGCCTGGAATGGATGGGCCTGATCTACCCTGGGGACTCTGACACCA |
| (HC = hIgG1) | | GATACAGCCCTAGCCTGGAAGGCCAGGTGTCCATCTCTGCTGACAAG |
| (LC = kappa) | | AGCATCTCTGCAGCCTACCTGCAGTTCAGCAGCCTGAAGGCCTCTGA |
| | | CTCTGCCATGTACTACTGTGTCAGAAAGGGCTACTCTGCCTACCTTG |
| | | GAGGATGGTTTGATCCTTGGGGCCAGGGCACACTGGTTACAGTGTCC |
| | | TCTGCCAGCACAAAGGGCCCCTCTGTTTTTCCACTGGCTCCCAGCAG |
| | | CAAGTCCACCAGTGGTGGTACAGCTGCCCTGGGCTGTCTGGTCAAGG |
| | | ATTACTTCCCTGAGCCTGTGACTGTGTCCTGGAACTCTGGTGCTCTG |
| | | ACCTCTGGGGTGCACACCTTTCCAGCTGTGCTGCAGTCCTCTGGCCT |
| | | GTACTCTCTGTCCTCTGTGGTCACAGTGCCTAGCTCTAGCCTGGGCA |
| | | CCCAGACCTACATCTGCAATGTGAACCACAAGCCTAGCAACACCAAG |
| | | GTGGACAAGAGAGTGGAACCCAAGAGCTGTGACAAGACCCACACCTG |
| | | TCCTCCATGTCCTGCTCCAGAACTGCTTGGAGGCCCTTCTGTGTTCC |
| | | TGTTTCCTCCAAAGCCTAAGGACACCCTGATGATCAGCAGAACCCCT |
| | | GAAGTGACCTGTGTGGTGGTGGATGTGTCCCATGAGGACCCAGAAGT |
| | | GAAGTTCAATTGGTATGTGGATGGGGTTGAAGTGCACAATGCCAAGA |
| | | CCAAGCCTAGAGAGGAACAGTACAACAGCACCTACAGAGTGGTGTCT |
| | | GTGCTGACAGTGCTGCACCAGGACTGGCTGAATGGCAAAGAGTACAA |
| | | GTGCAAGGTGTCCAACAAGGCCCTGCCTGCTCCTATTGAGAAAACCA |
| | | TCAGCAAGGCCAAGGGCCAGCCAAGAGAACCCCAGGTTTACACCCTG |
| | | CCACCTAGCAGAGAAGAGATGACCAAGAATCAGGTGTCCCTGACCTG |
| | | CCTGGTTAAGGGCTTCTACCCCTCTGACATTGCTGTGGAATGGGAGA |
| | | GCAATGGCCAGCCTGAGAACAACTACAAGACAACCCCTCCTGTGCTG |
| | | GACTCTGATGGCTCATTCTTCCTGTACAGCAAGCTGACTGTGGACAA |
| | | GTCCAGATGGCAGCAGGGAAATGTGTTCAGCTGCTCTGTGATGCATG |
| | | AGGCCCTGCACAACCACTACACCCAGAAAAGTCTGTCTCTGTCCCCT |
| | | GGCAAGAGAAAGAGAAGAGGCTCTGGAGAAGGCAGAGGCTCCCTGCT |
| | | GACATGTGGGGATGTTGAAGAGAATCCTGGGCCTATGTATAGGATGC |
| | | AACTGCTCCTCCTGATTGCTCTGAGCCTGGCTCTTGTGACCAACTCT |
| | | GATATCCAGCTGACACAGAGCCCTGACAGCCTGGCTGCTTCTCTGGG |
| | | AGAGAGAGTGACCATCAACTGCAGAAGCTCCCAGAACATCTTCTACA |
| | | ACTCCAACAACAAGAACTTCCTGGCCTGGTATCAGCAAAAGGCTGGA |
| | | CAGAGCCCCAAGCTGCTGATCTACTGGGCCTCTACCAGAGAGTCTGG |
| | | GGTCCCAGACAGATTCTCTGGCTCTGGATCTGGCACAGACTTCACCC |
| | | TGACCATCAGTGGACTGCAGGCTGGGGATGTTGCTGTGTACTTCTGC |
| | | CAGCAGTACTTCACAGATGCCCCTACCTTTGGTGGTGGCACAAAGGT |
| | | GGAAATCAAGAGAACAGTGGCTGCCCCATCTGTGTTCATCTTCCCAC |
| | | CATCTGATGAACAGCTGAAGTCTGGCACTGCCTCTGTTGTGTGCCTG |
| | | CTGAACAACTTCTACCCTAGAGAAGCCAAGGTGCAGTGGAAAGTGGA |
| | | TAATGCCCTCCAGTCTGGCAATAGCCAAGAGTCAGTGACAGAGCAGG |
| | | ACTCCAAGGATTCCACCTACAGCCTGAGCAGCACCCTGACACTGAGC |
| | | AAGGCTGACTATGAGAAGCACAAAGTGTATGCCTGTGAAGTGACACA |
| | | CCAGGGACTGAGCAGCCCAGTGACCAAGAGCTTCAACAGGGGAGAGT |
| | | GCTGA |
| 31B6 IgG1 | 14 | ATGTACAGGATGCAGCTGCTGCTGCTCATTGCCCTGTCTCTGGCCCT |
| Leader- | | GGTCACCAATTCTGAAGTGCAGCTTCTGCAGTCTGGTGGTGGTGTTG |
| 31B6.hum.HC- | | TGCAGCCTGGTGGCTCTCTGAGACTGTCTTGTGAAGCCTCTGGCTTC |
| furin/T2A- | | ACCTTCAGCAGCTACAGCATGCACTGGGTTAGACAGGCCCCTGGCAA |
| Leader-31B6.LC | | AGGCCTGGAATGGCTGACCCTGATCAGCTACAATGGGGTCAACAAGT |
| (HC = hIgG1) | | ACTATGCCAAGTCTGTGAAGGGCAGATTTGCCATCAGCAGAGATGAC |
| (LC = lambda) | | AGCAAGAGCACCCTGTTTCTGCAGATGAACAGCCTGACCACAGATGA |
| | | CACAGCAGTGTACTACTGTGCCAGATGTCCCATTCCTAGAGCTGCCA |
| | | GCTACAGAAATGGGGACAACTACTTTGAGTTTGGCCAGGGCACACTG |
| | | GTCACAGTGTCCTCTGCCTCTACAAAGGGCCCCTCTGTGTTTCCTCT |
| | | GGCTCCTAGCAGCAAGTCCACCAGTGGTGGTACAGCTGCCCTGGGCT |
| | | GTCTGGTCAAGGATTACTTCCCTGAGCCTGTGACTGTGTCCTGGAAT |
| | | TCTGGGGCTCTGACCTCTGGGGTGCACACCTTTCCAGCTGTGCTGCA |
| | | GTCCTCTGGCCTGTACTCTCTGTCCTCTGTGGTTACAGTGCCAAGCA |
| | | GCTCTCTGGGCACCCAGACCTACATCTGCAATGTGAACCACAAGCCT |
| | | AGCAACACCAAGGTGGACAAGAGAGTGGAACCCAAGAGCTGTGACAA |
| | | GACCCACACCTGTCCTCCATGTCCTGCTCCAGAACTGCTTGGAGGCC |
| | | CATCAGTGTTTCTGTTCCCTCCAAAGCCTAAGGACACCCTGATGATC |
| | | AGCAGAACCCCTGAAGTGACCTGTGTGGTGGTGGATGTGTCCCATGA |
| | | GGACCCAGAAGTGAAGTTCAATTGGTATGTGGATGGGGTTGAAGTGC |
| | | ACAATGCCAAGACCAAGCCTAGAGAGGAACAGTACAACAGCACCTAC |
| | | AGAGTGGTGTCTGTGCTGACAGTGCTGCACCAGGACTGGCTGAATGG |
| | | CAAAGAGTACAAGTGCAAGGTGTCCAACAAGGCCCTGCCTGCTCCTA |
| | | TTGAGAAAACCATCAGCAAGGCCAAGGGCCAGCCAAGAGAACCCCAG |
| | | GTTTACACCCTGCCACCTAGCAGAGAAGAGATGACCAAGAACCAGGT |
| | | GTCCCTGACCTGCCTGGTTAAGGGCTTCTACCCCTCTGACATTGCTG |
| | | TGGAATGGGAGAGCAATGGCCAGCCTGAGAACAACTACAAGACAACC |
| | | CCTCCTGTGCTGGACTCTGATGGCTCATTCTTCCTGTACAGCAAGCT |
| | | GACTGTGGACAAGTCCAGATGGCAGCAGGGAAATGTGTTCAGCTGCT |
| | | CTGTGATGCATGAGGCCCTGCACAACCACTACACCCAGAAAAGTCTG |
| | | AGTCTGAGCCCTGGCAAGAGAAAGAGAAGAGGCTCTGGAGAAGGCAG |
| | | AGGCAGCCTGCTGACATGTGGGGATGTTGAAGAGAATCCTGGGCCTA |
| | | TGTATAGAATGCAACTGCTCCTCCTGATTGCTCTGAGCCTGGCTCTG |
| | | GTTACCAACAGCCAGGCTGTGGTCACACAAGAGCCCAGCCTGTCTGT |
| | | GTCTCCTGGTGGAACAGTGACCCTGACTTGTGCCCTCTCTTCTGCCT |
| | | CTGTGTCCACAAGCAGCTACCCCAGCTGGTATCAGCAGACACCTGGC |
| | | CAGCCACCTAGAATGCTGATCCACAACACTGACACCAGAAGCTCTGG |
| | | GGTCCCAGACAGATTCTCTGGCAGCATCCTGGGAAAGAAGGCTGCCC |
| | | TGACAATCACTGGTGCCCAGGCTGATGATGAGTCTGACTACTATTGT |
| | | GTGGTGTACCTTGGCAATGGCTTTTGGGTGTTCGGTGGTGGCACCAA |
| | | ACTGACTGTGCTGGGACAGCCTAAAGCTGCCCCTTCTGTGACACTGT |
| | | TCCCACCTAGCTCTGAGGAACTGCAGGCCAACAAAGCCACACTTGTG |
| | | TGCCTGATCTCTGACTTCTACCCTGGGGCTGTGACAGTGGCTTGGAA |
| | | GGCTGATAGCAGCCCTGTGAAGGCTGGGGTTGAGACAACCACACCTA |
| | | GCAAGCAGAGCAACAACAAATATGCTGCCTCCAGCTATCTGTCTCTG |
| | | ACCCCTGAGCAGTGGAAGTCCCACAGATCCTACAGCTGTCAAGTGAC |
| | | CCATGAGGGCTCCACAGTGGAAAAGACAGTGGCCCCAACAGAGTGCA |
| | | GCTGA |
| 8H1 IgG1 | 15 | ATGTACAGAATGCAGCTGCTGCTGCTCATTGCCCTGTCTCTGGCCCT |
| Leader- | | GGTCACCAATTCTGAAGTGCAGCTGGTGGAAAGTGGTGGTGGACTGG |
| 8H1.hum.HC | | TTCAGCCTGGTGGCAGCCTGAGACTGTCTTGTGCTGCCTCTGGCTTC |
| furin/T2A- | | ACCTTCAGCATCTACACCATGAGCTGGGTCAGACAGGCCCCTGGCAA |
| Leader-8H1.LC | | AGGACTGGAATGGGTGTCAGCCATCCTGTCTGATGGCAGCACCTACT |
| (HC = hIgG1) | | ATGCTGACTCTGTGGAAGGCAGATTCACCATCAGCAGAGACAACAGC |
| (LC = kappa) | | AAGACCACACTGTACCTGCAGATGAACAGCCTGACAGCTGAGGACAC |
| | | AGCAGTGTACTACTGCACCAAGAGAGTGGAAGGCTCCTTCAGAGGCT |
| | | GGGGCCAGGGAACACTGGTTACAGTGTCCTCTGCCAGCACAAAGGGC |
| | | CCCTCTGTTTTTCCACTGGCTCCCAGCAGCAAGAGCACCAGTGGTGG |
| | | AACAGCTGCCCTGGGCTGTCTGGTCAAGGATTACTTCCCTGAGCCTG |
| | | TGACTGTGTCCTGGAACTCTGGTGCACTGACCTCTGGGGTGCACACC |
| | | TTTCCAGCTGTGCTGCAGTCCTCTGGCCTGTACTCTCTGTCCTCTGT |
| | | GGTCACAGTGCCTAGCTCTAGCCTGGGCACCCAGACCTACATCTGCA |
| | | ATGTGAACCACAAGCCTAGCAACACCAAGGTGGACAAAAGAGTGGAA |
| | | CCCAAGAGCTGTGACAAGACCCACACCTGTCCTCCATGTCCTGCTCC |
| | | AGAACTGCTTGGAGGCCCTTCTGTGTTCCTGTTTCCTCCAAAGCCTA |
| | | AGGACACCCTGATGATCAGCAGAACCCCTGAAGTGACCTGTGTGGTG |
| | | GTTGATGTGTCCCATGAGGACCCAGAAGTGAAGTTCAATTGGTATGT |
| | | GGATGGGGTTGAAGTGCACAATGCCAAGACCAAGCCTAGAGAGGAAC |
| | | AGTACAACTCCACCTACAGAGTGGTGTCTGTGCTGACAGTGCTGCAC |
| | | CAGGACTGGCTGAATGGCAAAGAGTACAAGTGCAAGGTGTCCAACAA |
| | | GGCCCTGCCTGCTCCTATTGAGAAAACCATCTCCAAGGCCAAGGGCC |
| | | AGCCAAGAGAACCCCAGGTTTACACCCTGCCACCTAGCAGAGAAGAG |
| | | ATGACCAAGAACCAGGTGTCCCTGACCTGCCTGGTTAAGGGCTTCTA |
| | | CCCCTCTGACATTGCTGTGGAATGGGAGAGCAATGGCCAGCCTGAAA |
| | | ACAACTACAAGACAACCCCTCCTGTGCTGGACTCAGATGGCTCATTC |
| | | TTCCTGTACAGCAAGCTGACTGTGGACAAGTCCAGGTGGCAGCAGGG |
| | | AAATGTGTTCAGCTGCTCTGTGATGCATGAGGCCCTGCACAACCACT |
| | | ACACCCAGAAAAGTCTGAGTCTGAGCCCTGGCAAGAGAAAGAGAAGA |
| | | GGCTCTGGAGAAGGCAGAGGCTCCCTGCTGACATGTGGGGATGTTGA |
| | | AGAGAATCCTGGGCCTATGTATAGGATGCAACTGCTCCTCCTGATTG |
| | | CTCTGAGCCTGGCTCTTGTGACCAACTCTGAGATTGTGATGACACAG |
| | | AGCCCAGGCACACTGTCACTGTCTCCAGGGGAATCTGCCACTCTGAG |
| | | CTGTAGAGCCAGCCAGTCTGTGTCTACCACCTACCTGGCCTGGTATC |
| | | AGCAAAAGCCTGGACAGGCTCCCAGACTGCTGATCTATGGGGCCTCT |
| | | TCTAGAGCCACAGGCATCCCTGACAGATTTTCTGGCAGTGGCTCTGG |
| | | CACAGACTTCACCCTGACCATCTCTAGACTGGAACCTGAGGACTTTG |
| | | CTGTCTACTACTGCCAGCAGTATGGTGGCTCCAGACTGATCACCTTT |
| | | GGCCAGGGCACCAGACTGGAAATCAAGAGAACAGTGGCTGCCCCATC |
| | | TGTGTTCATCTTCCCACCATCTGATGAGCAGCTCAAGTCTGGCACTG |
| | | CCTCTGTTGTGTGCCTGCTGAACAACTTCTACCCTAGAGAAGCCAAG |
| | | GTGCAGTGGAAGGTTGACAATGCCCTGCAGTCTGGCAATAGCCAAGA |
| | | ATCTGTGACAGAGCAGGACTCCAAGGATAGCACCTACAGCCTGTCTA |
| | | GCACCCTGACACTGAGCAAGGCTGACTATGAGAAGCACAAAGTGTAT |
| | | GCCTGTGAAGTGACACACCAGGGCCTGAGCAGCCCAGTGACCAAGAG |
| | | CTTCAATAGAGGGGAGTGCTGA |

[0194] Composite nucleic acid sequences that are incorporated into expression cassettes are engineered to express various formats of an antibody. See FIGS. 1B and 1C.—For dimeric antibody formats, gene therapy constructs are designed such that both the heavy and light chains (or fragments thereof making up an antigen-binding fragment) are expressed. The coding sequences for the heavy and light chains can be engineered in a single construct in which the heavy and light chains are separated by a cleavable linker or IRES so that separate heavy and light chain polypeptides are expressed. In certain embodiments, the composite nucleic acid sequences encode for a Fab, Fab′ or F(ab′)₂. In certain embodiments, the construct expresses, from the N-terminus to C-terminus, NH2-leader or localization sequence—VL (optionally CL)-cleavable linker-leader or localization sequence—VH (optionally C_{H}1 and all or a portion of the hinge)-COOH, or NH2-leader or localization sequence—VH (optionally C_{H}1 and all or a portion of the hinge)—cleavable linker-leader or localization sequence—VL (optionally CL)-COOH. In some embodiments, the construct expresses, from the N-terminus to C-terminus, NH2—VL (optionally CL)-cleavable linker-VH (optionally C_{H}1 and all or a portion of the hinge)-COOH, or NH2-VH-cleavable linker-VL-COOH. In certain embodiments the full length heavy and light chains of the antibody are expressed. In some embodiments, the construct expresses, from the N-terminus to C-terminus, NH2—VL-CL-cleavable linker-VH+HC—COOH, or NH2—VH+HC-cleavable linker-VL-CL-COOH. In other embodiments, the construct expresses, from the N-terminus to C-terminus, NH2—leader or localization sequence-VL-cleavable linker-leader or localization sequence-VH+HC≡COOH, or NH2-leader or localization sequence—VH+HC—cleavable linker-leader or localization sequence—VL-CL-COOH.

[0195] Gene therapy constructs are also designed such that the antibody is expressed as a single chain format comprising at least one heavy chain variable region and at least one light chain variable region (such as scFv). In some embodiments, the construct expresses a scFv in which the heavy and light chain variable domains are connected via a flexible, non-cleavable linker. In some embodiments, the construct expresses two tandem scFv molecules (taFv). In certain embodiments, the construct expresses, from the N-terminus to C-terminus, NH2-VL-linker-VH—COOH or NH2-VH-linker-VL-COOH. In other embodiments, the construct expresses, from the N-terminus to C-terminus, NH2-leader or localization sequence-VL-linker-VH—COOH or NH2—leader or localization sequence-VH-linker-VL-COOH. In certain embodiments, a taFv is expressed from a single-gene construct encoding two scFv in tandem connected by a peptide linker. In some embodiments, the construct expresses, from the N-terminus to the C-terminus, NH2-leader or localization sequence-VH(A)-linker(>12)-VL(A)-peptide linker-VH(B)-linker(>12)-VL(B)—COOH. The amino acid sequences of the components of the scFv proteins expressed are provided in Table 11A. The proteins encoded by exemplary constructs are provided in Tables 11B (scFv-Fcs) and 11C (scFvs), and may be encoded by the nucleotide sequences provided in Table 11D (encoding components of the scFvs and scFv-Fcs) and 11E and 11F (encoding scFv-Fc constructs) and Table 11G (encoding Fab constructs).

[0196] In certain embodiments, the scFv is fused to the hinge and Fc regions of immunoglobulins (scFv-Fc) or to the third constant domain of an IgG (scFv-C_{H}3, also known as a minibody), with or without a hinge region. In intact IgG, the upper hinge contains a cysteine residue which is incorporated into a disulfide bond with the C-terminal cysteine of the kappa light chain. Since kappa light chain is absent from scFv-Fc fusion proteins, the upper hinge can be truncated, the cysteine mutated to another amino acid such as serine or proline, or the “native” sequence can be maintained, in which case it is possible that the extra cysteine residues could form an additional interchain disulfide bond. In some embodiments, the construct expresses from the N-terminus to C-terminus, NH2-leader or localization sequence-VH-linker-VL-hinge region-C_{H}2-C_{H}3-COOH. In other embodiments, the construct expresses from the N-terminus to the C-terminus, NH2-leader or localization sequence-VH-linker-VL-hinge region-C_{H}3-COOH. In some embodiments, the configuration of VH and VL is reversed. For example, in one embodiment, the construct expresses from the N-terminus to C-terminus, NH2-leader or localization sequence-VL-linker-VH-hinge region-C_{H}3-COOH. Exemplary scFv-Fc proteins encoded by the expression constructs are provided in Table 11B, as encoded by exemplary nucleotide sequences provided in Table 11E and Table 11F.

[0197] In some embodiments, the construct expresses a scFv-Fc-scFv antibody. In one embodiment, the construct expresses, from the N-terminus to the C-terminus, NH2-leader or localization sequence-VH(A)-linker-VL(A)-hinge region-constant C_{H}2 and constant C_{H}3 regions of an IgG-spacer-VH(B)-linker(VL(B)—COOH (see Pohl SC et al, (2012), “A Cassette Vector System for the Rapid Cloning and Production of Bispecific Tetravalent Antibodies.”).

[0198] In some embodiments, the construct expresses a single antibody fragment consisting of a single monomeric variable antibody domain (“nanobody”). In embodiments, the single antibody fragment is a heavy chain variable domain or a light chain variable domain. In one embodiment, the construct expresses, from the N-terminus to the C-terminus, NH2-leader or localization sequence-VH—COOH. In another embodiment, the construct expresses, from the N-terminus to the C-terminus, NH2-leader or localization sequence-VL-COOH.

[0199] Gene therapy constructs are also designed such that the antibody is expressed as diabody or triabody. Diabodies are stable non-covalent scFv dimers produced by reducing the length of the intra scFv peptide linkers to less than 8 amino acid residues. This prohibits the VH and VL domains of a single chain from associating with each other to form a functional scFv, as the VH and VL domains have a high affinity to each other. The most stable conformation is a non-covalent dimer in which the VH and VL domain from one scFv pairs with the VH and VL domain of a second scFv to form a functional structure with two binding pockets. In some embodiments, the construct expresses from the N-terminus to C-terminus, NH2-leader or localization sequence-VH-linker with less than 9 amino acid residues-VL-COOH. In some embodiments, the intra-scFv linker length is further reduced to less than 5 amino acid residues leading to the formation of a non-covalent tripod-shaped timer (“tribody”). In some embodiments, two polypeptide chains are expressed with either the arrangement VH(A)-linker-VL(B) and VH(B)-linker-VL(A) (HL configuration) or VL(A)-linker(<=9)-VH(B) and VL(B)-linker(<=9)-VH(A) (LH configuration), respectively, to create a bispecific diabody. In some embodiments, two polypeptide chains are expressed using a furin 2A-based or IRES-based bicistronic cassette carrying both diabody chain A and diabody chain B. In preferred embodiments, the diabody is a single chain diabody (scDb), wherein the linker connecting the two chains has the same length as used for the generation of scFv molecules (e.g. ˜15). In some embodiments, the construct expresses, from the N-terminus to the C-terminus, NH2-leader or localization sequence-VH(A)-linker(<=9)-VL(B)-peptide linker-VH(B)-linker(<=9)-VL(A)-COOH. In some embodiments, the construct expresses, from the N-terminus to the C-terminus, NH2-leader or localization sequence-VH(A)-linker(<=9)-VL(A)-peptide linker(<12)-VH(B)-linker(<=9)-VL(B)—COOH. In some embodiments, the diabody or scDb is fused to a C_{H}3 or Fc region. In some embodiments, the Db—C_{H}3 or DB-Fc fusion protein is obtained by fusing the C_{H}3 domain or the Fc region (including the hinge region) to one of the two different chains (“di-diabodies”).

[0200] Gene therapy constructs are also designed such that the antibody is expressed as divalent molecules that are produced through the genetic fusion of an scFv molecule and a C_{H}3 domain of a human IgG molecule. The presence of C_{H}3 domains in minibodies leads to dimerization of two scFv-C_{H}3 fusion proteins to yield the (scFv-C_{H}3)₂ minibody structure. In some embodiments, the construct expresses, from the N-terminus to the C-terminus, NH2-leader or localization sequence-VL-linker(>12)-VH—C_{H}3 domain-COOH.

### Furin-2A Linkers

[0201] In other embodiments, the viral vectors provided herein encode the heavy and light chains (either full length, or variable domain, or variable domain and one constant domain, such as the C_{H}1 domain or the CL domain) of the anti-Tau antibodies described herein separated by an IRES or a cleavable linker such as the self-cleaving 2A and 2A-like peptides, with or without upstream furin cleavage sites, e.g. Furin/2A linkers, such as furin/F2A (F/F2A) or furin/T2A (F/T2A) linkers (Fang et al., 2005, Nature Biotechnology 23: 584-590, Fang, 2007, Mol Ther 15: 1153-9, and Chang, J. et al, MAbs 2015, 7(2):403-412, each of which is incorporated by reference herein in its entirety). For example, a furin/2A linker may be incorporated into an expression cassette to separate the heavy and light chain coding sequences, resulting in a construct with the structure:

[0202] Leader—Heavy chain—Furin site—2A site—Leader—Light chain—PolyA.

[0203] A 2A site or 2A-like site, such as an F2A site comprising the amino acid sequence RKRR(GSG)APVKQTLNFDLLKLAGDVESNPGP (SEQ ID NO: 138) or a T2A site comprising the amino acid sequence RKRR(GSG)EGRGSLLTCGDVEENPGP (SEQ ID NO: 139), is self-processing, resulting in “cleavage” between the final G and P amino acid residues.

[0204] Several linkers, with or without an upstream flexible Gly-Ser-Gly (GSG) linker sequence (SEQ ID NO: 140), that could be used include but are not limited to:

T2A:
(SEQ ID NO: 141)
(GSG)EGRGSLLTCGDVEENPGP;
P2A:
(SEQ ID NO: 142)
(GSG)ATNFSLLKQAGDVEENPGP;
E2A:
(SEQ ID NO: 143)
(GSG)QCTNYALLKLAGDVESNPGP;
F2A:
(SEQ ID NO: 144)
(GSG)APVKQTLNFDLLKLAGDVESNPGP

(see also, e.g., Szymczak, et al., 2004, Nature Biotechnol 22(5):589-594, and Donnelly, et al., 2001, J Gen Virol, 82:1013-1025, each of which is incorporated herein by reference). Exemplary nucleotide sequences encoding different parts of the linker are described in Table 8.

[0205] In certain embodiments an additional proteolytic cleavage site, e.g., a furin cleavage site, is incorporated into the expression construct adjacent to the self-processing cleavage site (e.g., 2A or 2A-like sequence), thereby providing a means to remove additional amino acids that remain following cleavage by the self-processing cleavage sequence. Without being bound to any one theory, a peptide bond is skipped when the ribosome encounters the 2A sequence in the open reading frame, resulting in the termination of translation, or continued translation of the downstream sequence (the light chain). This self-processing sequence results in a string of additional amino acids at the end of the C-terminus of the heavy chain. However, such additional amino acids can then be cleaved by host cell Furin at the furin cleavage site(s), e.g., located immediately prior to the 2A site and after the heavy chain sequence, and further cleaved by carboxypeptidases. The resultant heavy chain may have one, two, three, or more additional amino acids included at the C-terminus, or it may not have such additional amino acids, depending on the sequence of the Furin linker used and the carboxypeptidase that cleaves the linker in vivo (See, e.g., Fang et al., 17 Apr. 2005, Nature Biotechnol. Advance Online Publication; Fang et al., 2007, Molecular Therapy 15(6):1153-1159; Luke, 2012, Innovations in Biotechnology, Ch. 8, 161-186). Furin linkers that may be used comprise a series of four basic amino acids, for example, RKRR (SEQ ID NO: 145), RRRR (SEQ ID NO: 146), RRKR (SEQ ID NO: 147), or RKKR (SEQ ID NO: 148). Once this linker is cleaved by a carboxypeptidase, additional amino acids may remain, such that an additional zero, one, two, three or four amino acids may remain on the C-terminus of the heavy chain, for example, R, RR, RK, RKR, RRR, RRK, RKK, RKRR (SEQ ID NO: 145), RRRR (SEQ ID NO: 146), RRKR (SEQ ID NO: 147), or RKKR (SEQ ID NO: 148). In certain embodiments, once the linker is cleaved by a carboxypeptidase, no additional amino acids remain. In certain embodiments, 0.5% to 1%, 1% to 2%, 5%, 10%, 15%, or 20% of the antibody, e.g., antigen-binding fragment, population produced by the constructs for use in the methods described herein has one, two, three, or four amino acids remaining on the C-terminus of the heavy chain after cleavage. In certain embodiments, the furin linker has the sequence R-X-K/R-R, such that the additional amino acids on the C-terminus of the heavy chain are R, RX, RXK, RXR, RXKR, or RXRR, where X is any amino acid, for example, alanine (A). In certain embodiments, no additional amino acids may remain on the C-terminus of the heavy chain.

### Flexible Peptide Linkers

[0206] In some embodiments, a single construct can be engineered to encode both the heavy and light chains or fragments thereof that participate in antigen binding (e.g. the heavy and light chain variable domains) separated by a flexible peptide linker such as those in a scFv. These linkers can also link an scFv to an Fc domain to form an scFv-Fc. A flexible peptide linker can be composed of flexible residues like glycine and serine so that the adjacent heavy chain and light chain domains are free to move relative to one another. Commonly used flexible linkers have sequences consisting primarily of stretches of four Gly and one Ser residue (“GS” linker), an example of the most widely used flexible linker having the sequence of (Gly-Gly-Gly-Gly-Ser)n (GGGGS or G4S; SEQ ID NO: 149). By adjusting the copy number “n”, the length of this GS linker can be optimized to achieve appropriate separation of the functional domains, or to maintain necessary inter-domain interactions. Examples include, but are not limited to (Gly-Gly-Gly-Gly-Ser)2 (SEQ ID NO: 150), (Gly-Gly-Gly-Gly-Ser)3 (SEQ ID NO: 151), (Gly-Gly-Gly-Gly-Ser)4 (SEQ ID NO: 152), and (Gly-Gly-Gly-Gly-Ser)5 (SEQ ID NO: 153). Besides the GS linkers, many other flexible linkers have been designed for recombinant fusion proteins (Chen, X. et al, Adv Drug Deliv Rev. 2013 Oct. 15; 65(10): 1357-1369). See, e.g., Table 11A.

[0207] The construct may be arranged such that the heavy chain variable domain is at the N-terminus of the scFv, followed by the linker and then the light chain variable domain. Alternatively, the construct may be arranged such that the light chain variable domain is at the N-terminus of the scFv, followed by the linker and then the heavy chain variable domain. That is, the components may be arranged as NH2-VL-linker-VH—COOH or NH2-VH-linker-VL-COOH.

[0208] In certain embodiments, an expression cassette described herein is contained within a viral vector with a restraint on the size of the polynucleotide(s) therein. In certain embodiments, the expression cassette is contained within an AAV virus-based vector. Due to the size restraints of certain vectors, the vector may or may not accommodate the coding sequences for the full heavy and light chains of the therapeutic antibody but may accommodate the coding sequences of the heavy and light chains of antigen binding fragments, such as the heavy and light chains of a Fab or F(ab′)₂ fragment or an scFv. In particular, the AAV vectors described herein may accommodate a transgene of approximately 4.7-up to theoretically 5.2 kilobases. For constructs such as those in FIGS. 1B and 1C that contain the CAG or CB7 promoter, rabbit β-globin polyA signal, and ITRs, the therapeutic antibody encoded may be more than 750 amino acids. Substitution of smaller expression elements would permit the expression of larger protein products, such as full-length therapeutic antibodies.

### 5.2.4. Constant Region Modifications

[0209] In certain embodiments, the transgenes encode full length or substantially full length heavy and light chains that associate to form a full length or intact antibody. (“Substantially intact” or “substantially full length” refers to a mAb having a heavy chain sequence that is at least 95% identical to the full-length heavy chain mAb amino acid sequence and a light chain sequence that is at least 95% identical to the full-length light chain mAb amino acid sequence). Accordingly, the transgenes comprise nucleotide sequences (Table 1, SEQ ID NOs: 1-6) that encode, for example, the light and heavy chains variable domains, that may make up, with the C_{H}1 and all or a portion of the hinge domain and the CL domain, Fab fragments, e.g., FIGS. 1D-1F (Table 2, SEQ ID NOs: 97-102 for the heavy and light chain variable domain amino acid sequences and 187-192 for the amino acid sequences of the Fab portion of the heavy and light chain)), including the hinge region of the heavy chain (Table 7) and C-terminal of the heavy chain of the Fab fragment, an Fc domain peptide (Table 6). Table 6 provides the amino acid sequences of the IgG1 (SEQ ID NO: 196), IgG2 (SEQ ID NO: 197), and IgG4 (SEQ ID NO: 198) Fc domain (C_{H}2 and C_{H}3), IgG1 (SEQ ID NO: 103, 110 (PG-LALA form)), IgG2 (SEQ ID NO: 105), and IgG4 (SEQ ID NO: 107, 109 (S228P form)) constant domains (C_{H}1, hinge region, C_{H}2, and C_{H}3), and IgG1 (SEQ ID NO: 199), IgG2 (SEQ ID NO: 200), and IgG4 (SEQ ID NO: 201) C_{H}3 domains, which may be utilized for the therapeutic antibodies described herein. As detailed, the transgene may comprise a nucleotide sequence encoding the Fc polypeptide for the therapeutic antibody linked to the nucleotide sequence encoding the heavy chain Fab fragment at the C terminus of the hinge region as provided in section 5.2.1 and FIGS. 1D-1F. The transgene may also comprise a nucleotide sequence encoding the C_{H}3 domain of the Fc polypeptide for the therapeutic antibody linked to the nucleotide sequence encoding the heavy chain Fab fragment at the C terminus of the hinge region as provided in section 5.2.1 or may include both the C_{H}2 and C_{H}3 domain (an Fc domain) linked to the C terminus of the hinge domain.

TABLE 6
Exemplary Heavy and Light chain constant region sequences

| | SEQ | |
|---|---|---|
| Structure | ID | Sequence |
| Human IgG1 | 193 | ASTKGPSVFPLAPSSKSTSGGTAALGCLVKDYFPEPVTVSWNSGALTSG |
| C_{H}1 domain | | VHTFPAVLQSSGLYSLSSVVTVPSSSLGTQTYICNVNHKPSNTKVDKRV |
| amino acid | | |
| sequence | | |
| Human IgG1- | 196 | FPPKPKDTLMISRTPEVTCVVVDVSHEDPEVKFNWYVDGVEVHNAKTKP |
| Fc (CH2 and | | REEQYNSTYRVVSVLTVLHQDWLNGKEYKCKVSNKALPAPIEKTISKAK |
| CH3) domain | | GQPREPQVYTLPPSREEMTKNQVSLTCLVKGFYPSDIAVEWESNGQPEN |
| amino acid | | NYKTTPPVLDSDGSFFLYSKLTVDKSRWQQGNVFSCSVMHEALHNHYTQ |
| sequence | | KSLSLSPGK |
| Human IgG1 | 199 | QPREPQVYTLPPSREEMTKNQVSLTCLVKGFYPSDIAVEWESNGQPENN |
| CH3 domain | | YKTTPPVLDSDGSFFLYSKLTVDKSRWQQGNVFSCSVMHEALHNHYTQK |
| amino acid | | SLSLSPGK |
| sequence | | |
| Human IgG1- | 103 | ASTKGPSVFPLAPSSKSTSGGTAALGCLVKDYFPEPVTVSWNSGALTSG |
| constant domain | | VHTFPAVLQSSGLYSLSSVVTVPSSSLGTQTYICNVNHKPSNTKVDKRV |
| amino acid | | EPKSCDKTHTCPPCPAPELLGGPSVFLFPPKPKDTLMISRTPEVTCVVV |
| sequence | | DVSHEDPEVKFNWYVDGVEVHNAKTKPREEQYNSTYRVVSVLTVLHQDW |
| (C_{H}1-hinge- | | LNGKEYKCKVSNKALPAPIEKTISKAKGQPREPQVYTLPPSREEMTKNQ |
| CH2-CH3) | | VSLTCLVKGFYPSDIAVEWESNGQPENNYKTTPPVLDSDGSFFLYSKLT |
| | | VDKSRWQQGNVFSCSVMHEALHNHYTQKSLSLSPGK |
| | | C_{H}1 domain is in italics. Hinge is underlined. |
| Human IgG1- | 104 | GCCAGCACAAAGGGCCCCTCTGTTTTTCCACTGGCTCCCAGCAGCAAGA |
| constant domain | | GCACCAGTGGTGGAACAGCTGCCCTGGGCTGTCTGGTCAAGGATTACTT |
| exemplary | | CCCTGAGCCTGTGACTGTGTCCTGGAACTCTGGTGCACTGACCTCTGGG |
| nucleotide | | GTGCACACCTTTCCAGCTGTGCTGCAGTCCTCTGGCCTGTACTCTCTGT |
| sequence | | CCTCTGTGGTCACAGTGCCTAGCTCTAGCCTGGGCACCCAGACCTACAT |
| (C_{H}1-hinge- | | CTGCAATGTGAACCACAAGCCTAGCAACACCAAGGTGGACAAAAGAGTG |
| CH2-CH3) | | GAACCCAAGAGCTGTGACAAGACCCACACCTGTCCTCCATGTCCTGCTC |
| | | CAGAACTGCTTGGAGGCCCTTCTGTGTTCCTGTTTCCTCCAAAGCCTAA |
| | | GGACACCCTGATGATCAGCAGAACCCCTGAAGTGACCTGTGTGGTGGTT |
| | | GATGTGTCCCATGAGGACCCAGAAGTGAAGTTCAATTGGTATGTGGATG |
| | | GGGTTGAAGTGCACAATGCCAAGACCAAGCCTAGAGAGGAACAGTACAA |
| | | CTCCACCTACAGAGTGGTGTCTGTGCTGACAGTGCTGCACCAGGACTGG |
| | | CTGAATGGCAAAGAGTACAAGTGCAAGGTGTCCAACAAGGCCCTGCCTG |
| | | CTCCTATTGAGAAAACCATCTCCAAGGCCAAGGGCCAGCCAAGAGAACC |
| | | CCAGGTTTACACCCTGCCACCTAGCAGAGAAGAGATGACCAAGAACCAG |
| | | GTGTCCCTGACCTGCCTGGTTAAGGGCTTCTACCCCTCTGACATTGCTG |
| | | TGGAATGGGAGAGCAATGGCCAGCCTGAAAACAACTACAAGACAACCCC |
| | | TCCTGTGCTGGACTCAGATGGCTCATTCTTCCTGTACAGCAAGCTGACT |
| | | GTGGACAAGTCCAGGTGGCAGCAGGGAAATGTGTTCAGCTGCTCTGTGA |
| | | TGCATGAGGCCCTGCACAACCACTACACCCAGAAAAGTCTGAGTCTGAG |
| | | CCCTGGCAAG |
| Human IgG2 | 194 | ASTKGPSVFPLAPCSRSTSESTAALGCLVKDYFPEPVTVSWNSGALTSG |
| CH1 domain | | VHTFPAVLQSSGLYSLSSVVTVPSSNFGTQTYTCNVDHKPSNTKVDKTV |
| Human IgG2- | 197 | FPPKPKDTLMISRTPEVTCVVVDVSHEDPEVQFNWYVDGVEVHNAKTKP |
| Fc (CH2 and | | REEQFNSTFRVVSVLTVVHQDWLNGKEYKCKVSNKGLPAPIEKTISKTK |
| CH3) domain | | GQPREPQVYTLPPSREEMTKNQVSLTCLVKGFYPSDISVEWESNGQPEN |
| amino acid | | NYKTTPPMLDSDGSFFLYSKLTVDKSRWQQGNVFSCSVMHEALHNHYTQ |
| sequence | | KSLSLSPGK |
| Human IgG2 | 200 | GQPREPQVYTLPPSREEMTKNQVSLTCLVKGFYPSDISVEWESNGQPEN |
| CH3 domain | | NYKTTPPMLDSDGSFFLYSKLTVDKSRWQQGNVFSCSVMHEALHNHYTQ |
| amino acid | | KSLSLSPGK |
| sequence | | |
| Human IgG2- | 105 | ASTKGPSVFPLAPCSRSTSESTAALGCLVKDYFPEPVTVSWNSGALTSG |
| constant domain | | VHTFPAVLQSSGLYSLSSVVTVPSSNFGTQTYTCNVDHKPSNTKVDKTV |
| amino acid | | ERKCCVECPPCPAPPVAGPSVFLFPPKPKDTLMISRTPEVTCVVVDVSH |
| sequence | | EDPEVQFNWYVDGVEVHNAKTKPREEQFNSTFRVVSVLTVVHQDWLNGK |
| (C_{H}1-hinge- | | EYKCKVSNKGLPAPIEKTISKTKGQPREPQVYTLPPSREEMTKNQVSLT |
| CH2-CH3) | | CLVKGFYPSDISVEWESNGQPENNYKTTPPMLDSDGSFFLYSKLTVDKS |
| | | RWQQGNVFSCSVMHEALHNHYTQKSLSLSPGK |
| | | C_{H}1 domain is in italics. Hinge is underlined. |
| Human IgG2- | 106 | GCGAGCACCAAAGGCCCGAGCGTGTTTCCGCTGGCGCCGTGCAGCCGCA |
| constant domain | | GCACCAGCGAAAGCACCGCGGCGCTGGGCTGCCTGGTGAAAGATTATTT |
| exemplary | | TCCGGAACCGGTGACCGTGAGCTGGAACAGCGGCGCGCTGACCAGCGGC |
| nucleotide | | GTGCATACCTTTCCGGCGGTGCTGCAGAGCAGCGGCCTGTATAGCCTGA |
| sequence | | GCAGCGTGGTGACCGTGCCGAGCAGCAACTTTGGCACCCAGACCTATAC |
| (C_{H}1-hinge- | | CTGCAACGTGGATCATAAACCGAGCAACACCAAAGTGGATAAAACCGTG |
| CH2-CH3) | | GAACGCAAATGCTGCGTGGAATGCCCGCCGTGCCCGGCGCCGCCGGTGG |
| | | CGGGCCCGAGCGTGTTTCTGTTTCCGCCGAAACCGAAAGATACCCTGAT |
| | | GATTAGCCGCACCCCGGAAGTGACCTGCGTGGTGGTGGATGTGAGCCAT |
| | | GAAGATCCGGAAGTGCAGTTTAACTGGTATGTGGATGGCGTGGAAGTGC |
| | | ATAACGCGAAAACCAAACCGCGCGAAGAACAGTTTAACAGCACCTTTCG |
| | | CGTGGTGAGCGTGCTGACCGTGGTGCATCAGGATTGGCTGAACGGCAAA |
| | | GAATATAAATGCAAAGTGAGCAACAAAGGCCTGCCGGCGCCGATTGAAA |
| | | AAACCATTAGCAAAACCAAAGGCCAGCCGCGCGAACCGCAGGTGTATAC |
| | | CCTGCCGCCGAGCCGCGAAGAAATGACCAAAAACCAGGTGAGCCTGACC |
| | | TGCCTGGTGAAAGGCTTTTATCCGAGCGATATTAGCGTGGAATGGGAAA |
| | | GCAACGGCCAGCCGGAAAACAACTATAAAACCACCCCGCCGATGCTGGA |
| | | TAGCGATGGCAGCTTTTTTCTGTATAGCAAACTGACCGTGGATAAAAGC |
| | | CGCTGGCAGCAGGGCAACGTGTTTAGCTGCAGCGTGATGCATGAAGCGC |
| | | TGCATAACCATTATACCCAGAAAAGCCTGAGCCTGAGCCCGGGCAAATA |
| | | A |
| Human IgG4 | 195 | ASTKGPSVFPLAPCSRSTSESTAALGCLVKDYFPEPVTVSWNSGALTSG |
| C_{H}1 domain | | VHTFPAVLQSSGLYSLSSVVTVPSSSLGTKTYTCNVDHKPSNTKVDKRV |
| amino acid | | |
| sequence | | |
| Human IgG4 | 201 | QPREPQVYTLPPSQEEMTKNQVSLTCLVKGFYPSDIAVEWESNGQPENN |
| CH3 domain | | YKTTPPVLDSDGSFFLYSRLTVDKSRWQEGNVFSCSVMHEALHNHYTQK |
| | | SLSLSLGK |
| Human IgG4- | 198 | FPPKPKDTLMISRTPEVTCVVVDVSQEDPEVQFNWYVDGVEVHNAKTKP |
| Fc (CH2 and | | REEQFNSTYRVVSVLTVLHQDWLNGKEYKCKVSNKGLPSSIEKTISKAK |
| CH3) domain | | GQPREPQVYTLPPSQEEMTKNQVSLTCLVKGFYPSDIAVEWESNGQPEN |
| amino acid | | NYKTTPPVLDSDGSFFLYSRLTVDKSRWQEGNVFSCSVMHEALHNHYTQ |
| sequence | | KSLSLSLGK |
| Human IgG4- | 107 | ASTKGPSVFPLAPCSRSTSESTAALGCLVKDYFPEPVTVSWNSGALTSG |
| constant amino | | VHTFPAVLQSSGLYSLSSVVTVPSSSLGTKTYTCNVDHKPSNTKVDKRV |
| acid sequence | | ESKYGPPCPSCPAPEFLGGPSVFLFPPKPKDTLMISRTPEVTCVVVDVS |
| (C_{H}1-hinge- | | QEDPEVQFNWYVDGVEVHNAKTKPREEQFNSTYRVVSVLTVLHQDWLNG |
| CH2-CH3) | | KEYKCKVSNKGLPSSIEKTISKAKGQPREPQVYTLPPSQEEMTKNQVSL |
| | | TCLVKGFYPSDIAVEWESNGQPENNYKTTPPVLDSDGSFFLYSRLTVDK |
| | | SRWQEGNVFSCSVMHEALHNHYTQKSLSLSLGK |
| | | C_{H}1 domain is in italics. Hinge is underlined. |
| Human IgG4- | 108 | GCCTCCACCAAGGGCCCATCGGTCTTCCCCCTGGCGCCCTGCTCCAGGA |
| constant domain | | GCACCTCCGAGAGCACAGCGGCCCTGGGCTGCCTGGTCAAGGACTACTT |
| exemplary | | CCCCGAACCGGTGACGGTGTCGTGGAACTCAGGCGCCCTGACCAGCGGC |
| nucleotide | | GTGCACACCTTCCCGGCTGTCCTACAGTCCTCAGGACTCTACTCCCTCA |
| sequence | | GCAGCGTGGTGACCGTGCCCTCCAGCAGCTTGGGCACGAAGACCTACAC |
| (C_{H}1-hinge- | | CTGCAATGTAGATCACAAGCCCAGCAACACCAAGGTGGACAAGAGAGTT |
| CH2-CH3) | | GAGTCCAAATATGGTCCCCCGTGCCCATCATGCCCAGCACCTGAATTCC |
| | | TGGGGGGACCATCAGTCTTCCTGTTCCCCCCAAAACCCAAGGACACCCT |
| | | CATGATCTCCCGGACCCCTGAGGTCACGTGCGTGGTGGTGGACGTGAGC |
| | | CAGGAAGACCCCGAGGTCCAGTTCAACTGGTACGTGGATGGCGTGGAGG |
| | | TGCATAATGCCAAGACAAAGCCGCGGGAGGAGCAGTTCAACAGCACGTA |
| | | CCGTGTGGTCAGCGTCCTCACCGTCGTGCACCAGGACTGGCTGAACGGC |
| | | AAGGAGTACAAGTGCAAGGTCTCCAACAAAGGCCTCCCGTCCTCCATCG |
| | | AGAAAACCATCTCCAAAGCCAAAGGGCAGCCCCGAGAGCCACAGGTGTA |
| | | CACCCTGCCCCCATCCCAGGAGGAGATGACCAAGAACCAGGTCAGCCTG |
| | | ACCTGCCTGGTCAAAGCCTTCTACCCCAGCGACATCGCCGTGGAGTGGG |
| | | AGAGCAATGGGCAGCCGGAGAACAACTACAAGACCACGCCTCCCGTGCT |
| | | GGACTCCGACGGCTCCTTCTTCCTCTACAGCAGGCTAACCGTGGACAAG |
| | | AGCAGGTGGCAGGAGGGGAATGTCTTCTCATGCTCCGTGATGCATGAGG |
| | | CTCTGCACAACCACTACACGCAGAAGAGCCTCTCCCTGTCTCTGGGTAA |
| | | A |
| Human IgG4 | 109 | ASTKGPSVFPLAPCSRSTSESTAALGCLVKDYFPEPVTVSWNSGALTSG |
| constant domain | | VHTFPAVLQSSGLYSLSSVVTVPSSSLGTKTYTCNVDHKPSNTKVDKRV |
| S228P amino | | ESKYGPPCPPCPAPEFLGGPSVFLFPPKPKDTLMISRTPEVTCVVVDVS |
| acid sequence | | QEDPEVQFNWYVDGVEVHNAKTKPREEQFNSTYRVVSVLTVLHQDWLNG |
| (C_{H}1-hinge- | | KEYKCKVSNKGLPSSIEKTISKAKGQPREPQVYTLPPSQEEMTKNQVSL |
| CH2-CH3) | | TCLVKGFYPSDIAVEWESNGQPENNYKTTPPVLDSDGSFFLYSRLTVDK |
| | | SRWQEGNVFSCSVMHEALHNHYTQKSLSLSLGK |
| | | C_{H}1 domain is in italics. Hinge is underlined. |
| | | S228P is shown in bold. |
| Human IgG1- | 110 | ASTKGPSVFPLAPSSKSTSGGTAALGCLVKDYFPEPVTVSWNSGALTSG |
| constant | | VHTFPAVLQSSGLYSLSSVVTVPSSSLGTQTYICNVNHKPSNTKVDKKV |
| domain-LALA- | | EPKSCDKTHTCPPCPAPEAAGGPSVFLFPPKPKDTLMISRTPEVTCVVV |
| PG-amino acid | | DVSHEDPEVKFNWYVDGVEVHNAKTKPREEQYNSTYRVVSVLTVLHQDW |
| sequence | | LNGKEYKCKVSNKALGAPIEKTISKAKGQPREPQVYTLPPSRDELTKNQ |
| (C_{H}1-hinge- | | VSLTCLVKGFYPSDIAVEWESNGQPENNYKTTPPVLDSDGSFFLYSKLT |
| CH2-CH3) | | VDKSRWQQGNVFSCSVMHEALHNHYTQKSLSLSPGK |
| | | C_{H}1 domain is in italics. Hinge is underlined. |
| | | L234A/L235A/P329G are shown in bold. |
| Human IgG1- | 111 | GCGAGCACCAAAGGCCCGAGCGTGTTTCCGCTGGCGCCGAGCAGCAAAA |
| constant | | GCACCAGCGGCGGCACCGCGGCGCTGGGCTGCCTGGTGAAAGATTATTT |
| domain-LALA- | | TCCGGAACCGGTGACCGTGAGCTGGAACAGCGGCGCGCTGACCAGCGGC |
| PG-exemplary | | GTGCATACCTTTCCGGCGGTGCTGCAGAGCAGCGGCCTGTATAGCCTGA |
| nucleotide | | GCAGCGTGGTGACCGTGCCGAGCAGCAGCCTGGGCACCCAGACCTATAT |
| sequence | | TTGCAACGTGAACCATAAACCGAGCAACACCAAAGTGGATAAAAAAGTG |
| (C_{H}1-hinge- | | GAACCGAAAAGCTGCGATAAAACCCATACCTGCCCGCCGTGCCCGGCGC |
| CH2-CH3) | | CGGAAGCGGCGGGCGGCCCGAGCGTGTTTCTGTTTCCGCCGAAACCGAA |
| | | AGATACCCTGATGATTAGCCGCACCCCGGAAGTGACCTGCGTGGTGGTG |
| | | GATGTGAGCCATGAAGATCCGGAAGTGAAATTTAACTGGTATGTGGATG |
| | | GCGTGGAAGTGCATAACGCGAAAACCAAACCGCGCGAAGAACAGTATAA |
| | | CAGCACCTATCGCGTGGTGAGCGTGCTGACCGTGCTGCATCAGGATTGG |
| | | CTGAACGGCAAAGAATATAAATGCAAAGTGAGCAACAAAGCGCTGGGCG |
| | | CGCCGATTGAAAAAACCATTAGCAAAGCGAAAGGCCAGCCGCGCGAACC |
| | | GCAGGTGTATACCCTGCCGCCGAGCCGCGATGAACTGACCAAAAACCAG |
| | | GTGAGCCTGACCTGCCTGGTGAAAGGCTTTTATCCGAGCGATATTGCGG |
| | | TGGAATGGGAAAGCAACGGCCAGCCGGAAAACAACTATAAAACCACCCC |
| | | GCCGGTGCTGGATAGCGATGGCAGCTTTTTTCTGTATAGCAAACTGACC |
| | | GTGGATAAAAGCCGCTGGCAGCAGGGCAACGTGTTTAGCTGCAGCGTGA |
| | | TGCATGAAGCGCTGCATAACCATTATACCCAGAAAAGCCTGAGCCTGAG |
| | | CCCGGGCAAA |
| Mouse IgG2a- | 112 | AKTTAPSVYPLAPVCGDTTGSSVTLGCLVKGYFPEPVTLTWNSGSLSSG |
| constant domain | | VHTFPAVLQSDLYTLSSSVTVTSSTWPSQSITCNVAHPASSTKVDKKIE |
| amino acid | | PRGPTIKPCPPCKCPAPNLLGGPSVFIFPPKIKDVLMISLSPIVTCVVV |
| sequence | | DVSEDDPDVQISWFVNNVEVHTAQTQTHREDYNSTLRVVSALPIQHQDW |
| (C_{H}1-hinge- | | VTLTCMVTDFMPEDIYVEWTNNGKTELNYKNTEPVLDSDGSYFMYSKLR |
| CH2-CH3) | | VEKKNWVERNSYSCSVVHEGLHNHHTTKSFSRTPGK |
| | | C_{H}1 is in italics. Hinge region is underlined. |
| Mouse IgG2a- | 113 | GCTAAGACAACAGCCCCTTCTGTGTACCCTCTGGCTCCTGTGTGTGGGG |
| constant domain | | ACACAACAGGATCCTCTGTGACACTGGGCTGCCTGGTCAAGGGCTACTT |
| exemplary | | TCCTGAGCCAGTGACACTGACCTGGAACTCTGGATCTCTGTCCTCTGGG |
| nucleotide | | GTGCACACATTCCCTGCTGTGCTGCAGTCTGACCTGTACACCCTGAGCA |
| sequence | | GCAGTGTGACAGTGACCAGCAGCACATGGCCCAGCCAGAGCATCACCTG |
| (C_{H}1-hinge- | | TAATGTGGCTCACCCTGCCAGCTCCACCAAGGTGGACAAGAAGATTGAG |
| CH2-CH3) | | CCTAGAGGCCCCACCATCAAGCCCTGTCCTCCATGCAAGTGTCCTGCTC |
| | | CTAACCTGCTTGGAGGCCCCTCTGTGTTCATCTTCCCACCTAAGATCAA |
| | | GGATGTGCTGATGATCTCTCTGAGCCCCATTGTGACCTGTGTGGTGGTT |
| | | GATGTGTCTGAGGATGACCCAGATGTGCAGATCTCTTGGTTTGTGAACA |
| | | ATGTGGAAGTGCACACAGCCCAGACACAGACCCACAGAGAGGACTACAA |
| | | CAGCACCCTGAGAGTGGTGTCTGCCCTGCCTATCCAGCACCAGGACTGG |
| | | ATGTCTGGCAAAGAGTTCAAGTGCAAAGTGAACAACAAGGACCTGCCTG |
| | | CTCCAATTGAGAGAACCATCAGCAAGCCCAAGGGCTCTGTTAGAGCCCC |
| | | TCAAGTGTATGTGCTGCCTCCACCTGAGGAAGAGATGACCAAGAAACAA |
| | | GTGACCCTGACATGCATGGTCACTGACTTCATGCCTGAGGACATCTATG |
| | | TGGAATGGACCAACAATGGCAAGACAGAGCTGAACTACAAGAACACTGA |
| | | GCCTGTGCTGGACTCTGATGGCAGCTACTTCATGTACAGCAAGCTGAGG |
| | | GTTGAGAAGAAGAACTGGGTTGAGAGAAACAGCTACTCCTGCTCTGTGG |
| | | TGCATGAGGGCCTGCACAACCATCACACCACAAAGAGCTTCAGCAGAAC |
| | | CCCAGGCAAG |
| Mouse IgG2a- | 114 | AKTTAPSVYPLAPVCGDTTGSSVTLGCLVKGYFPEPVTLTWNSGSLSSG |
| constant domain | | VHTFPAVLQSDLYTLSSSVTVTSSTWPSQSITCNVAHPASSTKVDKKIE |
| LALA-PG- | | PRGPTIKPCPPCKCPAPNAAGGPSVFIFPPKIKDVLMISLSPIVTCVVV |
| amino acid | | DVSEDDPDVQISWFVNNVEVHTAQTQTHREDYNSTLRVVSALPIQHQDW |
| sequence | | MSGKEFKCKVNNKDLGAPIERTISKPKGSVRAPQVYVLPPPEEEMTKKQ |
| | | VTLTCMVTDFMPEDIYVEWTNNGKTELNYKNTEPVLDSDGSYFMYSKLR |
| | | VEKKNWVERNSYSCSVVHEGLHNHHTTKSFSRTPGK |
| | | C_{H}1 domain is in italics. Hinge is underlined. |
| | | LALA-PG variants are shown in bold. |
| Mouse IgG2a- | 115 | GCCAAGACAACTGCCCCTTCTGTGTACCCTCTGGCTCCTGTGTGTGGGG |
| constant domain | | ACACAACAGGATCCTCTGTGACACTGGGCTGCCTGGTCAAGGGCTACTT |
| LALA-PG- | | TCCTGAGCCAGTGACACTGACCTGGAACTCTGGATCTCTGTCCTCTGGG |
| exemplary | | GTGCACACATTCCCTGCTGTGCTGCAGTCTGACCTGTACACCCTGAGCA |
| nucleotide | | GCTCTGTGACTGTGACCAGCAGCACATGGCCCAGCCAGAGCATCACCTG |
| sequence | | TAATGTGGCTCACCCTGCCAGCTCCACCAAGGTGGACAAGAAGATTGAG |
| | | CCTAGAGGCCCCACCATCAAGCCCTGTCCTCCATGCAAGTGTCCTGCTC |
| | | CTAACGCCGCTGGAGGCCCCTCTGTGTTCATCTTCCCACCTAAGATCAA |
| | | GGATGTGCTGATGATCTCTCTGAGCCCCATTGTGACCTGTGTGGTGGTT |
| | | GATGTGTCTGAGGATGACCCTGATGTGCAGATCTCTTGGTTTGTGAACA |
| | | ATGTGGAAGTGCACACAGCCCAGACACAGACCCACAGAGAGGACTACAA |
| | | CAGCACCCTGAGAGTGGTGTCTGCCCTGCCTATCCAGCACCAGGACTGG |
| | | ATGTCTGGCAAAGAGTTCAAGTGCAAAGTGAACAACAAGGACCTGGGAG |
| | | CTCCAATTGAGAGAACCATCTCCAAGCCTAAGGGCTCTGTCAGGGCCCC |
| | | TCAAGTGTATGTGCTGCCACCTCCTGAGGAAGAGATGACCAAGAAACAA |
| | | GTGACCCTGACATGCATGGTCACAGACTTCATGCCTGAGGACATCTATG |
| | | TGGAATGGACCAACAATGGCAAGACAGAGCTGAACTACAAGAACACTGA |
| | | GCCTGTGCTGGACTCTGATGGCTCCTACTTCATGTACAGCAAGCTGAGG |
| | | GTTGAGAAGAAGAACTGGGTTGAGAGAAACAGCTACAGCTGCTCTGTGG |
| | | TGCATGAGGGCCTGCACAATCACCACACCACCAAGAGCTTCAGCAGAAC |
| | | CCCTGGCAAG |
| Kappa light | 116 | RTVAAPSVFIFPPSDEQLKSGTASVVCLLNNFYPREAKVQWKVDNALQS |
| chain C_{L} amino | | GNSQESVTEQDSKDSTYSLSSTLTLSKADYEKHKVYACEVTHQGLSSPV |
| acid sequence | | TKSFNRGEC |
| Kappa light | 117 | AGAACAGTGGCTGCCCCATCTGTGTTCATCTTCCCACCATCTGATGAGC |
| chain C_{L} | | AGCTCAAGTCTGGCACTGCCTCTGTTGTGTGCCTGCTGAACAACTTCTA |
| exemplary | | CCCTAGAGAAGCCAAGGTGCAGTGGAAGGTTGACAATGCCCTGCAGTCT |
| nucleotide | | GGCAATAGCCAAGAATCTGTGACAGAGCAGGACTCCAAGGATAGCACCT |
| sequence | | ACAGCCTGTCTAGCACCCTGACACTGAGCAAGGCTGACTATGAGAAGCA |
| | | CAAAGTGTATGCCTGTGAAGTGACACACCAGGGCCTGAGCAGCCCAGTG |
| | | ACCAAGAGCTTCAATAGAGGGGAGTGC |
| Lambda light | 118 | GQPKSSPSVTLFPPSSEELETNKATLVCTITDFYPGVVTVDWKVDGTPV |
| chain C_{L} amino | | TQGMETTQPSKQSNNKYMASSYLTLTARAWERHSSYSCQVTHEGHTVEK |
| acid sequence | | SLSRADCS |
| Lambda light | 119 | GGCCAGCCTAAAAGCAGCCCCTCTGTGACACTGTTCCCTCCAAGCTCTG |
| chain C_{L} | | AGGAACTGGAAACAAACAAGGCCACACTTGTGTGCACCATCACAGACTT |
| exemplary | | CTACCCTGGGGTTGTGACAGTGGACTGGAAAGTGGATGGCACCCCTGTG |
| nucleotide | | ACACAAGGCATGGAAACCACACAGCCCAGCAAGCAGAGCAACAACAAGT |
| sequence | | ACATGGCCAGCTCCTATCTGACCCTGACAGCCAGAGCCTGGGAGAGACA |
| | | CAGCTCTTACAGCTGCCAAGTGACCCATGAGGGCCACACAGTGGAAAAG |
| | | AGCCTGAGCAGAGCTGACTGCTCT |

[0210] Based on the degeneracy of the genetic code, it is understood that the nucleotide sequences provided in Table 6 are exemplary and non-limiting. In some embodiments, the expressed heavy chain constant region is selected from a sequence in Table 6 having a nucleic acid sequence of SEQ ID NOs: 104, 106, 108, 111, 113, or 115 or a variant thereof having at least 70% (e.g., at least 70%, 75%, 80%, 85%, 90%, 91%, 92%, 93%, 94%, 95%, 96%, 97%, 98%, 99% or more) sequence identity to the nucleic acid sequence of 104, 106, 108, 111, 113, or 115 and that has the biologic activity of the constant region.

[0211] In some embodiments, the antibody light chain constant region or domain is selected from a sequence in Table 6 having a nucleic acid sequence of SEQ ID NOs: 117 or 119 or a variant thereof having at least 70% (e.g., at least 70%, 75%, 80%, 85%, 90%, 91%, 92%, 93%, 94%, 95%, 96%, 97%, 98%, 99% or more) sequence identity to the nucleic acid sequence of SEQ ID NOs: 117, or 119 and that has the biologic activity of the constant region.

[0212] In certain embodiments, a viral vector of the disclosure incorporates a heavy chain constant region and/or a light chain constant region selected from Table 6 having a nucleic acid sequence of SEQ ID NOs: 104, 106, 108, 111, 113, 115, 117, or 119 or a variant thereof having at least 70% (e.g., at least 70%, 75%, 80%, 85%, 90%, 91%, 92%, 93%, 94%, 95%, 96%, 97%, 98%, 99% or more) sequence identity to the nucleic acid sequence of SEQ ID NOs: 104, 106, 108, 111, 113, 115, 117, or 119 and that has the biologic activity of the constant region.

[0213] In other embodiments, the immunoglobulin constant regions are engineered to provide “effectorless” function. In some embodiments, the anti-Tau antibodies have an IgG4 or IgG2 isotype constant region, such that antibodies having an Fc domain of the IgG4 or IgG2 isotype exhibit reduced effector function as compared to antibodies having an Fc domain of the IgG1 isotype. In some embodiments, the effectorless Fc domain is an aglycosylated IgG1, IgG2, or IgG4 Fc domain that has a substitution at residue 297 or 299 to alter the glycosylation site at 297 such that the Fc domain exhibits reduced ADCC or other effector activity. Amino acid numbering of immunoglobulin constant regions described throughout the present disclosure is according to the EU index as in Kabat et al. (1991, NIH Publication 91-3242, National Technical Information Services, Springfield, Va., which is hereby incorporated by reference). In some embodiments, amino acids at positions 234, 235, 329 of the IgG1 constant region are modified (or mutated) in order to reduce effector function, also known as Fc function. As such, the L234A, L235A, P329G (LALA-PG) variant eliminates complement binding and fixation as well as Fc-7 dependent antibody-dependent cell-mediated cytotoxity (ADCC) in both murine IgG2a and human IgG1. Other non-limiting Fc modifications are described herein.

[0214] In certain embodiments, the transgenes encode full length or substantially full length heavy and light chains that associate to form a full length or intact antibody. “Substantially full length” refers to a mAb having a heavy chain sequence that includes the hinge region of the heavy chain and C-terminal (C_{H}1, SEQ ID NOs: 193-195) of the heavy chain (Fab fragment), and all or part of an Fc domain (C_{H}2 and/or C_{H}3, SEQ ID NOs: 196, 197, or 198). Table 6 provides the amino acid sequences of the Fc polypeptides for certain of the therapeutic antibodies described herein.

[0215] The term “Fc region” refers to a dimer of two “Fc polypeptides” (or “Fc domains”), each “Fc polypeptide” comprising the heavy chain constant region of an antibody excluding the first constant region immunoglobulin domain. In some embodiments, an “Fc region” includes two Fc polypeptides linked by one or more disulfide bonds, chemical linkers, or peptide linkers. “Fc polypeptide” refers to at least the last two constant region immunoglobulin domains of IgA, IgD, and IgG, or the last three constant region immunoglobulin domains of IgE and IgM and may also include part or all of the flexible hinge N-terminal to these domains. For IgG, e.g., “Fc polypeptide” (or “Fc domain”) comprises immunoglobulin domains Cgamma2 (Cγ2, often referred to as C_{H}2 domain) and Cgamma3 (Cγ3, also referred to as C_{H}3 domain) and may or may not include a portion of the lower part of the hinge domain between Cgamma1 (Cγ1, also referred to as C_{H}1 domain) and C_{H}2 domain. Although the boundaries of the Fc polypeptide may vary, the human IgG heavy chain Fc polypeptide may comprise residues starting at T223 or C226 or P230, to its carboxyl-terminus, wherein the numbering is according to the EU index as in Kabat et al. (1991, NIH Publication 91-3242, National Technical Information Services, Springfield, Va.). In other words, the Fc polypeptide (or Fc domain) may or may not comprise some portion of the hinge domain. Depending on the application, the hinge portion, or an engineered or chimeric hinge thereof, may be useful for flexibility or association (dimerization) of the Fc polypeptides. For IgA, e.g., Fc polypeptide comprises immunoglobulin domains Calpha2 (Cα2) and Calpha3 (Cα3) and may include the lower part of the hinge between Calpha1 (Cα1) and Cα2.

[0216] In certain embodiments, the Fc polypeptide corresponds to the Fc polypeptide of any immunoglobulin isotype. In still other embodiments, the Fc polypeptide is an IgG Fc polypeptide. The Fc polypeptide may be from the IgG1, IgG2, or IgG4, or may be an IgG3 Fc domain, depending, for example, upon the desired effector activity of the therapeutic antibody. In some embodiments, the engineered heavy chain constant region (C_{H}), which includes the Fc domain, is chimeric. As such, a chimeric C_{H} region combines C_{H} domains derived from more than one immunoglobulin isotype and/or subtype. For example, the chimeric (or hybrid) C_{H} region comprises part or all of an Fc region from IgG, IgA and/or IgM. In other examples, the chimeric C_{H} region comprises part or all a C_{H}2 domain derived from a human IgG1, human IgG2, or human IgG4 molecule, combined with part or all of a C_{H}3 domain derived from a human IgG1 (SEQ ID NO: 199), human IgG2 (SEQ ID NO: 200), or human IgG4 (SEQ ID NO: 201) molecule. In other embodiments, the chimeric C_{H} region contains a chimeric hinge region. Various hinge region sequences are set forth in Table 7. Also provided are embodiments in which 1, 2, 3, 4, 5, 6, 7 or 8 amino acids of the N-terminal sequence of the hinge is included, for example, EP, EPKS, EPKSCD, ES, ESKY, or ESKYGP.

[0217] The transgene may encode a Fab fragment having the nucleotide sequences encoding all or a portion of the hinge region with the amino acid sequences provided in Table 7, but not including the portion of the hinge region on the heavy chain that forms interchain di-sulfide bonds (e.g., the portion containing the sequence CPPCPA (SEQ ID NO: 202)). Heavy chain Fab domain sequences that do not contain a CPPCP (SEQ ID NO: 203) sequence of the hinge region at the C-terminus will not form intrachain disulfide bonds and, thus, will form Fab fragments with the corresponding light chain Fab domain sequences, whereas those heavy chain Fab domain sequences with a portion of the hinge region at the C-terminus containing the sequence CPPCP (SEQ ID NO: 203) will form intrachain disulfide bonds and, thus, will form Fab₂ fragments. For example, in some embodiments, the transgene may encode a scFv comprising a light chain variable domain and a heavy chain variable domain connected by a flexible linker in between (where the heavy chain variable domain may be either at the N-terminal end or the C-terminal end of the scFv), and optionally, may further comprise a Fc polypeptide (e.g., IgG1, IgG2, IgG3, or IgG4) on the C-terminal end of the heavy chain. Alternatively, in other embodiments, the transgene may encode F(ab′)₂ fragments comprising a nucleotide sequence that encodes the light chain and the heavy chain sequence that includes at least the sequence CPPCA (SEQ ID NO: 204) of the hinge region, as depicted in FIGS. 1D-1F, which depict various portions of the hinge region that may be included at the C-terminus of the heavy chain sequence. Pre-existing anti-hinge antibodies (AHA) may cause immunogenicity and reduce efficacy. Thus, in certain embodiments, for the IgG1 isotype, C-terminal ends with D221 or ends with a mutation T225L or with L242 can reduce binding to AHA. (See, e.g., Brezski, 2008, J Immunol 181: 3183-92 and Kim, 2016, 8: 1536-1547). For IgG2, the risk of AHA is lower since the hinge region of IgG2 is not as susceptible to enzymatic cleavage required to generate endogenous AHA. See e.g. Brezski 2011, MAbs 3: 558-567).

TABLE 7
Hinge Regions

| SEQ ID NO: | Sequence |
|---|---|
| 203 | CPPCP |
| 202 | CPPCPA |
| 204 | CPPCA |
| 172 | EPKSCDKTHTCPPCPAPELLGG |
| 175 | EPKSCDKTHLCPPCPAPELLGG |
| 177 | EPKSCDKTHL |
| 174 | EPKSCDKTHT |
| 173 | EPKSCDKTHTCPPCPA |
| 176 | EPKSCDKTHLCPPCPA |
| 178 | EPKSCDKTHTCPPCPAPELLGGPSVFL |
| 179 | EPKSCDKTHLCPPCPAPELLGGPSVFL |
| 205 | EPKSCDKTHTCPPCPAPEAAGG |
| 206 | EPKSCDKTHTCPPCPAPEAAGGPSVFL |
| 207 | EPKSCDKTHLCPPCPAPEAAGGPSVFL |
| 208 | ERKSCVECPPCPAPPVAG |
| 209 | ERKSCVECPPCPA |
| 180 | ESKYGPPCPPCPAPEFLGG |
| 210 | ESKYGPPCPSCPAPEFLGG |
| 181 | ESKYGPPCPPCPA |
| 182 | ESKYGPPCPSCPA |
| 183 | ESKYGPPCPSCPAPEFLGGPSVFL |
| 184 | ESKYGPPCPPCPAPEFLGGPSVFL |
| 185 | ERKCCVECPPCPAPPVAG |
| 186 | ERKCCVECPPCPA |
| 211 | EPKSCDKTHTCPPCPAPELAGA |
| 212 | EPKSCDKTHTCPPCPAPELAGAPSVFL |
| 213 | EPKSCDKTHLCPPCPAPELAGAPSVFL |
| 214 | EPKSCDKTHTCPPCPAPEFEGG |
| 215 | EPKSCDKTHTCPPCPAPEFEGGPSVFL |
| 216 | EPKSCDKTHLCPPCPAPEFEGGPSVFL |

[0218] In some embodiments, the recombinant vectors encode therapeutic antibodies comprising an engineered (mutant) Fc region, e.g. engineered Fc regions of an IgG constant region. Modifications to an antibody constant region, Fc region or Fc fragment of an IgG antibody may alter one or more effector functions such as Fc receptor binding or neonatal Fc receptor (FcRn) binding and thus half-life, CDC activity, ADCC activity, and/or ADPC activity, compared to a corresponding antibody having a wild-type IgG constant region, or an IgG heavy chain constant region without the recited modification(s). Accordingly, in some embodiments, the antibody may be engineered to provide an antibody constant region, Fc region or Fc fragment of an IgG antibody that exhibits altered binding (as compared to a reference or wild-type constant region without the recited modification(s)) to one or more Fc receptors (e.g., FcγRI, FcγRIIA, FcγRIIB, FcγRIIIA, FcγRIIIB, FcγRIV, or FcRn receptor). In some embodiments, the antibody an antibody constant region, Fc region or Fc fragment of an IgG antibody that exhibits a one or more altered effector functions such as CDC, ADCC, or ADCP activity, compared to a corresponding antibody having a wild-type IgG constant region, or an IgG constant without the recited modification(s).

[0219] “Effector function” refers to a biochemical event that results from the interaction of an antibody Fc region with an Fc receptor or ligand. Effector functions include FcγR-mediated effector functions such as ADCC and ADCP and complement-mediated effector functions such as CDC.

[0220] An “effector cell” refers to a cell of the immune system that expresses one or more Fc receptors and mediates one or more effector functions. Effector cells include but are not limited to monocytes, macrophages, neutrophils, dendritic cells, eosinophils, mast cells, platelets, B cells, large granular lymphocytes, Langerhans' cells, natural killer (NK) cells, and T cells, and may be from any organism including but not limited to humans, mice, rats, rabbits, and monkeys.

[0221] “ADCC” or “antibody dependent cell-mediated cytotoxicity” refers to the cell-mediated reaction wherein nonspecific cytotoxic effector (immune) cells that express FcγRs recognize bound antibody on a target cell and subsequently cause lysis of the target cell.

[0222] “ADCP” or “antibody dependent cell-mediated phagocytosis” refers to the cell-mediated reaction wherein nonspecific cytotoxic effector (immune) cells that express FcγRs recognize bound antibody on a target cell and subsequently cause phagocytosis of the target cell.

[0223] “CDC” or “complement-dependent cytotoxicity” refers to the reaction wherein one or more complement protein components recognize bound antibody on a target cell and subsequently cause lysis of the target cell.

[0224] In some embodiments, the modifications of the Fc domain include, but are not limited to, the following modifications and combinations thereof, with reference to EU numbering of an IgG constant region (Kabat et al, supra): 233, 234, 235, 236, 237, 238, 239, 248, 249, 250, 252, 254, 255, 256, 258, 265, 267, 268, 269, 270, 272, 276, 278, 280, 283, 285, 286, 289, 290, 292, 293, 294, 295, 296, 297, 298, 301, 303, 305, 307, 308, 309, 311, 312, 315, 318, 320, 322, 324, 326, 327, 328, 329, 330, 331, 332, 333, 334, 335, 337, 338, 339, 340, 342, 344, 356, 358, 359, 360, 361, 362, 373, 375, 376, 378, 380, 382, 383, 384, 386, 388, 389, 398, 414, 416, 419, 428, 430, 433, 434, 435, 437, 438, and 439.

[0225] In certain embodiments, the Fc region comprises an amino acid addition, deletion, or substitution of one or more of amino acid residues 251-256, 285-290, 308-314, 385-389, and 428-436 of the IgG. In some embodiments, 251-256, 285-290, 308-314, 385-389, and 428-436 (EU numbering of Kabat) is substituted with histidine, arginine, lysine, aspartic acid, glutamic acid, serine, threonine, asparagine, or glutamine. In some embodiments, a non-histidine residue is substituted with a histidine residue. In some embodiments, a histidine residue is substituted with a non-histidine residue.

[0226] Enhancement of FcRn binding by an antibody having an engineered Fc leads to preferential binding of the affinity-enhanced antibody to FcRn as compared to antibody having wild-type Fc, and thus leads to a net enhanced recycling of the FcRn-affinity-enhanced antibody, which results in further increased antibody half-life. An enhanced recycling approach allows highly effective targeting and clearance of antigens, including e.g. “high titer” circulating antigens, such as C5, cytokines, or bacterial or viral antigens.

[0227] Provided in certain embodiments are modified constant region, Fc region or Fc fragment of an IgG antibody with enhanced binding to FcRn in serum as compared to a wild-type Fc region (without engineered modifications). In some instances, antibodies, e.g. IgG antibodies, are engineered to bind to FcRn at a neutral pH, e.g., at or above pH 7.4, to enhance pH-dependence of binding to FcRn as compared to a wild-type Fc region (without engineered modifications). In some instances, antibodies, e.g. IgG antibodies, are engineered to exhibit enhanced binding (e.g. increased affinity or K_{D}) to FcRn in endosomes (e.g., at an acidic pH, e.g., at or below pH 6.0) relative to a wild-type IgG and/or reference antibody binding to FcRn at an acidic pH, as well as in comparison to binding to FcRn in serum (e.g., at a neutral pH, e.g., at or above pH 7.4). Provided are antibodies with an engineered antibody constant region, Fc region or Fc fragment of an IgG antibody that exhibits an improved serum or resident tissue half-life, compared to a corresponding antibody having a wild-type IgG constant region, or an IgG constant without the recited modification(s);

[0228] Non-limiting examples of such Fc modifications include, e.g., a modification at position 250 (e.g., E or Q); 250 and 428 (e.g., L or F); 252 (e.g., LN/Y/W or T), 254 (e.g., S or T), and 256 (e.g., S/R/Q/E/D or T); or a modification at position 428 and/or 433 (e.g., H/L/R/S/P/Q or K) and/or 434 (e.g., H/F or Y); or a modification at position 250 and/or 428; or a modification at position 307 or 308 (e.g., 308F, V308F), and 434. In one embodiment, the modification comprises a 428L (e.g., M428L) and 434S (e.g., N434S) modification; a 428L, 2591 (e.g., V2591), and 308F (e.g., V308F) modification; a 433K (e.g., H433K) and a 434 (e.g., 434Y) modification; a 252, 254, and 256 (e.g., 252Y, 254T, and 256E) modification; a 250Q and 428L modification (e.g., T250Q and M428L); and a 307 and/or 308 modification (e.g., 308F or 308P) (EU numbering; see FIG. 23).

[0229] In some embodiments, the Fc region can be a mutant form such as hIgG1 Fc including M252 mutations, e.g. M252Y and S254T and T256E (“YTE mutation”) exhibit enhanced affinity for human FcRn (Dall'Acqua, et al., 2002, J Immunol 169:5171-5180) and subsequent crystal structure of this mutant antibody bound to hFcRn resulting in the creation of two salt bridges (Oganesyan, et al. 2014, JBC 289(11): 7812-7824). Antibodies having the YTE mutation have been administered to monkeys and humans, and have significantly improved pharmacokinetic properties (Haraya, et al., 2019, Drug Metabolism and Pharmacokinetics, 34(1):25-41).

[0230] In some embodiments, modifications to one or more amino acid residues in the Fc region may reduce half-life in systemic circulation (serum), however result in improved retainment in tissues (e.g. in the eye) by disabling FcRn binding (e.g. H435A, EU numbering of Kabat) (Ding et al., 2017, MAbs 9:269-284; and Kim, 1999, Eur J Immunol 29:2819).

[0231] In some embodiments, the Fc domain may be engineered to activate all, some, or none of the normal Fc effector functions, without affecting the Fc polypeptide's (e.g. antibody's) desired pharmacokinetic properties. Fc polypeptides having altered effector function may be desirable as they may reduce unwanted side effects, such as activation of effector cells, by the therapeutic protein.

[0232] Methods to alter or even ablate effector function may include mutation(s) or modification(s) to the hinge region amino acid residues of an antibody. For example, IgG Fc domain mutants comprising 234A, 237A, and 238S substitutions, according to the EU numbering system, exhibit decreased complement dependent lysis and/or cell mediated destruction. Deletions and/or substitutions in the lower hinge, e.g. where positions 233-236 within a hinge domain (EU numbering) are deleted or modified to glycine, have been shown in the art to significantly reduce ADCC and CDC activity.

[0233] In certain embodiments, the Fc domain is an aglycosylated Fc domain that has a substitution at residue 297 or 299 to alter the glycosylation site at 297 such that the Fc domain is not glycosylated. Such aglycosylated Fc domains may have reduced ADCC or other effector activity.

[0234] Non-limiting examples of proteins comprising mutant and/or chimeric C_{H} regions having altered effector functions, and methods of engineering and testing mutant antibodies, are described in the art, e.g. K. L. Amour, et al., Eur. J. Immunol. 1999, 29:2613-2624; Lazar et al., Proc. Natl. Acad. Sci. USA 2006, 103:4005; US Patent Application Publication No. 20070135620A1 published Jun. 14, 2007; US Patent Application Publication No. 20080154025 A1, published Jun. 26, 2008; US Patent Application Publication No. 20100234572 A1, published Sep. 16, 2010; US Patent Application Publication No. 20120225058 A1, published Sep. 6, 2012; US Patent Application Publication No. 20150337053 A1, published Nov. 26, 2015; International Publication No. WO20/16161010A2 published Oct. 6, 2016; U.S. Pat. No. 9,359,437, issued Jun. 7, 2016; and U.S. Pat. No. 10,053,517, issued Aug. 21, 2018, all of which are each herein incorporated by reference.

[0235] The C-terminal lysines (-K) conserved in the heavy chain genes of all human IgG subclasses are generally absent from antibodies circulating in serum—the C-terminal lysines are cleaved off in circulation, resulting in a heterogeneous population of circulating IgGs (van den Bremer et al., 2015, mAbs 7:672-680). In the vectored constructs for full length mAbs, the DNA encoding the C-terminal lysine (-K) or glycine-lysine (-GK) of the Fe terminus can be deleted to produce a more homogeneous antibody product in situ. (See, Hu et al., 2017 Biotechnol. Prog. 33: 786-794 which is incorporated by reference herein in its entirety).

### 5.2.5. Regulatory Elements

[0236] Enhancers, acting in cis, are nucleic acid elements that may enhance, or strongly stimulate, transcription of the antibody gene of interest, usually when bound by transcription factors. Enhancers may be upstream or downstream of the operably linked gene, and may even be thousands of base pairs away. Enhancer sequences may be in forward or reverse orientation, and still be active. In still other instances, the optimal expression of the antibody of interest may require the presence of one or more introns.

[0237] In other embodiments, the expression cassettes comprise a polyadenylation (polyA) site downstream of the coding region of the transgene. Any polyA site that signals termination of transcription and directs the synthesis of a polyA tail is suitable for use in AAV vectors of the present disclosure. Exemplary polyA signals are derived from, but not limited to, the following: the SV40 late gene, the rabbit β-globin gene the bovine growth hormone (BPH) gene, the human growth hormone (hGH) gene, the synthetic polyA (SPA) site, and the bovine growth hormone (bGH) gene. See, e.g., Powell and Rivera-Soto, 2015, Discov. Med., 19(102):49-57 and Table 8.

[0238] Introns appear to affect multiple aspects of gene expression, for ex. transcription, polyadenylation, translational efficiency, mRNA decay and even RNA polymerase processivity. Synergistic interactions may exist between splicing and polyadenylation functions and may contribute to more efficient 3′ end processing. The presence of an intron is optional, especially where there are space restraints in a given expression cassette, protein expression may be increased by intron addition.

TABLE 8
Exemplary regulatory, linker and cassette sequences

| | SEQ | |
|---|---|---|
| | ID | |
| Name | NO: | Nucleic Acid Sequence |
| CAG | 16 | GACATTGATTATTGACTAGTTATTAATAGTAATCAATTACGGGGTC |
| (1725 bp) | | ATTAGTTCATAGCCCATATATGGAGTTCCGCGTTACATAACTTACG |
| | | GTAAATGGCCCGCCTGGCTGACCGCCCAACGACCCCCGCCCATTGA |
| | | CGTCAATAATGACGTATGTTCCCATAGTAACGCCAATAGGGACTTT |
| | | CCATTGACGTCAATGGGTGGAGTATTTACGGTAAACTGCCCACTTG |
| | | GCAGTACATCAAGTGTATCATATGCCAAGTACGCCCCCTATTGACG |
| | | TCAATGACGGTAAATGGCCCGCCTGGCATTATGCCCAGTACATGAC |
| | | CTTATGGGACTTTCCTACTTGGCAGTACATCTACGTATTAGTCATC |
| | | GCTATTACCATGGTCGAGGTGAGCCCCACGTTCTGCTTCACTCTCC |
| | | CCATCTCCCCCCCCTCCCCACCCCCAATTTTGTATTTATTTATTTT |
| | | TTAATTATTTTGTGCAGCGATGGGGGCGGGGGGGGGGGGGGGGCGC |
| | | GCGCCAGGCGGGGCGGGGCGGGGCGAGGGGCGGGGCGGGGCGAGGC |
| | | GGAGAGGTGCGGCGGCAGCCAATCAGAGCGGCGCGCTCCGAAAGTT |
| | | TCCTTTTATGGCGAGGCGGCGGCGGCGGCGGCCCTATAAAAAGCGA |
| | | AGCGCGCGGCGGGCGGGAGTCGCTGCGCGCTGCCTTCGCCCCGTGC |
| | | CCCGCTCCGCCGCCGCCTCGCGCCGCCCGCCCCGGCTCTGACTGAC |
| | | CGCGTTACTCCCACAGGTGAGCGGGCGGGACGGCCCTTCTCCTCCG |
| | | GGCTGTAATTAGCGCTTGGTTTAATGACGGCTTGTTTCTTTTCTGT |
| | | GGCTGCGTGAAAGCCTTGAGGGGCTCCGGGAGGGCCCTTTGTGCGG |
| | | GGGGAGCGGCTCGGGGGGTGCGTGCGTGTGTGTGTGCGTGGGGAGC |
| | | GCCGCGTGCGGCTCCGCGCTGCCCGGCGGCTGTGAGCGCTGCGGGC |
| | | GCGGCGCGGGGCTTTGTGCGCTCCGCAGTGTGCGCGAGGGGAGCGC |
| | | GGCCGGGGGCGGTGCCCCGCGGTGCGGGGGGGGCTGCGAGGGGAAC |
| | | AAAGGCTGCGTGCGGGGTGTGTGCGTGGGGGGGTGAGCAGGGGGTG |
| | | TGGGCGCGTCGGTCGGGCTGCAACCCCCCCTGCACCCCCCTCCCCG |
| | | AGTTGCTGAGCACGGCCCGGCTTCGGGTGCGGGGCTCCGTACGGGG |
| | | CGTGGCGCGGGGCTCGCCGTGCCGGGCGGGGGGTGGCGGCAGGTGG |
| | | GGGTGCCGGGCGGGGGGGGGCCGCCTCGGGCCGGGGAGGGCTCGGG |
| | | GGAGGGGCGCGGCGGCCCCCGGAGCGCCGGCGGCTGTCGAGGCGCG |
| | | GCGAGCCGCAGCCATTGCCTTTTATGGTAATCGTGCGAGAGGGCGC |
| | | AGGGACTTCCTTTGTCCCAAATCTGTGCGGAGCCGAAATCTGGGAG |
| | | GCGCCGCCGCACCCCCTCTAGCGGGCGCGGGGCGAAGCGGTGCGGC |
| | | GCCGGCAGGAAGGAAATGGGCGGGGAGGGCCTTCGTGCGTCGCCGC |
| | | GCCGCCGTCCCCTTCTCCCTCTCCAGCCTCGGGGCTGTCCGCGGGG |
| | | GGACGGCTGCCTTCGGGGGGGACGGGGCAGGGCGGGGTTCGGCTTC |
| | | TGGCGTGTGACCGGCGGCTCTAGAGCCTCTGCTAACCATGTTCATG |
| | | CCTTCTTCTTTTTCCTACAGCTCCTGGGCAACGTGCTGGTTATTGT |
| | | GCTGTCTCATCATTTTGGCAAAG |
| CMV Enhancer | 17 | GACATTGATTATTGACTAGTTATTAATAGTAATCAATTACGGGGTC |
| (380 bp) | | ATTAGTTCATAGCCCATATATGGAGTTCCGCGTTACATAACTTACG |
| | | GTAAATGGCCCGCCTGGCTGACCGCCCAACGACCCCCGCCCATTGA |
| | | CGTCAATAATGACGTATGTTCCCATAGTAACGCCAATAGGGACTTT |
| | | CCATTGACGTCAATGGGTGGAGTATTTACGGTAAACTGCCCACTTG |
| | | GCAGTACATCAAGTGTATCATATGCCAAGTACGCCCCCTATTGACG |
| | | TCAATGACGGTAAATGGCCCGCCTGGCATTATGCCCAGTACATGAC |
| | | CTTATGGGACTTTCCTACTTGGCAGTACATCTACGTATTAGTCATC |
| | | GCTATTACCATG |
| Chimeric intron | 18 | GTAAGTATCAAGGTTACAAGACAGGTTTAAGGAGACCAATAGAAAC |
| (ß-globin/Ig | | TGGGCTTGTCGAGACAGAGAAGACTCTTGCGTTTCTGATAGGCACC |
| Intron) | | TATTGGTCTTACTGACATCCACTTTGCCTTTCTCTCCACAG |
| VH4 intron | 217 | GTGAGTATCTCAGGGATCCAGACATGGGGATATGGGAGGTGC |
| | | CTCTGATCCCAGGGCTCACTGTGGGTCTCTCTGTTCACAG |
| SV40 intron | 218 | GTAAGTTTAGTCTTTTTGTCTTTTATTTCAGGTCCCGGATCCGGTG |
| | | GTGGTGCAAATCAAAGAACTGCTCCTCAGTGGATGTTGCCTTTACT |
| | | TCTAG |
| Kozak sequence | 342 | GCCACC |
| CB/CBA | 19 | CGCGTGGTACCTCTGGTCGTTACATAACTTACGGTAAATGGCCCGC |
| promoter | | CTGGCTGACCGCCCAACGACCCCGCCCATTGACGTCAATAATGACG |
| (594 bp) | | TATGTTCCCATAGTAACGCCAATAGGGACTTTCCATTGACGTCAAT |
| | | GGGTGGAGTATTTACGGTAAACTGCCCACTTGGCAGTACATCAAGT |
| | | GTATCATATGCCAAGTACGCCCCCTATTGACGTCAATGACGGTAAA |
| | | TGGCCCGCCTGGCATTATGCCCAGTACATGACCTTATGGGACTTTC |
| | | CTACTTGGCAGTACATCTACTCGAGGCCACGTTCTGCTTCACTCTC |
| | | CCCATCTCCCCCCCCTCCCCACCCCCAATTTTGTATTTATTTATTT |
| | | TTTAATTATTTTGTGCAGCGATGGGGGGGGGGGGGGGGGGGGGGGG |
| | | GGCGCGCGCCAGGCGGGGCGGGGCGGGGCGAGGGGCGGGGCGGGGC |
| | | GAGGCGGAGAGGTGCGGCGGCAGCCAATCAGAGCGGCGCGCTCCGA |
| | | AAGTTTCCTTTTATGGCGAGGCGGCGGCGGCGGCGGCCCTATAAAA |
| | | AGCGAAGCGCGCGGCGGGCGGGAGCGGGATCAGCCACCGCGG |
| UbC promoter | 20 | TATATAAGGACGCGCCGGGTGTGGCACAGCTAGTTCCGTCGCAGCC |
| | | GGGATTTGGGTCGCAGTTCTTGTTTGTGGATCGCTGTGATCGTCAC |
| | | TTGGTGAGTAGCGGGCTGCTGGGCTGGCCGGGGCTTTCGTGGCCGC |
| | | CGGGCCGCTCGGTGGGACGGAGGCGTGTGGAGAGACCGCCAAGGGC |
| | | TGTAGTCTGGGTCCGCGAGCAAGGTTGCCCTGAACTGGGGGTTGGG |
| | | GGGAGCGCAGCAAAATGGCGGCTGTTCCCGAGTCTTGAATGGAAGA |
| | | CGCTTGTGAGGCGGGCTGTGAGGTCGTTGAAACAAGGTGGGGGGCA |
| | | TGGTGGGCGGCAAGAACCCAAGGTCTTGAGGCCTTCGCTAATGCGG |
| | | GAAAGCTCTTATTCGGGTGAGATGGGCTGGGGCACCATCTGGGGAC |
| | | CCTGACGTGAAGTTTGTCACTGACTGGAGAACTCGGTTTGTCGTCT |
| | | GTTGCGGGGGCGGCAGTTATGGCGGTGCCGTTGGGCAGTGCACCCG |
| | | TACCTTTGGGAGCGCGCGCCCTCGTCGTGTCGTGACGTCACCCGTT |
| | | CTGTTGGCTTATAATGCAGGGTGGGGCCACCTGCCGGTAGGTGTGC |
| | | GGTAGGCTTTTCTCCGTCGCAGGACGCAGGGTTCGGGCCTAGGGTA |
| | | GGCTCTCCTGAATCGACAGGCGCCGGACCTCTGGTGAGGGGAGGGA |
| | | TAAGTGAGGCGTCAGTTTCTCTGGTCGGTTTTATGTACCTATCTTC |
| | | TTAAGTAGCTGAAGCTCCGGTTTTGAACTATGCGCTCGGGGTTGGC |
| | | GAGTGTGTTTTGTGAAGTTTTTTAGGCACCTTTTGAAATGTAATCA |
| | | TTTGGGTCAATATGTAATTTTCAGTGTTAGACTAGTAAATTGTCCG |
| | | CTAAATTCTGGCCGTTTTTGGCTTTTTTGTTAGAC |
| UbC Enhancer | 21 | GGCCTCCGCGCCGGGTTTTGGCGCCTCCCGCGGGCGCCCCCCTCCT |
| | | CACGGCGAGCGCTGCCACGTCAGACGAAGGGCGCAGCGAGCGTCCT |
| | | GATCCTTCCGCCCGGACGCTCAGGACAGCGGCCCGCTGCTCATAAG |
| | | ACTCGGCCTTAGAACCCCAGTATCAGCAGAAGGACATTTTAGGACG |
| | | GGACTTGGGTGACTCTAGGGCACTGGTTTTCTTTCCAGAGAGCGGA |
| | | ACAGGCGAGGAAAAGTAGTCCCTTCTCGGCGATTCTGCGGAGGGAT |
| | | CTCCGTGGGGCGGTGAACGCCGATGAT |
| hSyn-1 promoter | 22 | AGTGCAAGTGGGTTTTAGGACCAGGATGAGGCGGGGTGGGGGTGCC |
| (448 bp) | | TACCTGACGACCGACCCCGACCCACTGGACAAGCACCCAACCCCCA |
| | | TTCCCCAAATTGCGCATCCCCTATCAGAGAGGGGGAGGGGAAACAG |
| | | GATGCGGCGAGGCGCGTGCGCACTGCCAGCTTCAGCACCGCGGACA |
| | | GTGCCTTCGCCCCCGCCTGGCGGCGCGCGCCACCGCCGCCTCAGCA |
| | | CTGAAGGCGCGCTGACGTCACTCGCCGGTCCCCCGCAAACTCCCCT |
| | | TCCCGGCCACCTTGGTCGCGTCCGCGCCGCCGCCGGCCCAGCCGGA |
| | | CCGCACCACGCGAGGCGCGAGATAGGGGGGCACGGGCGCGACCATC |
| | | TGCGCTGCGGCGCCGGCGACTCAGCGCTGCCTCAGTCTGCGGTGGG |
| | | CAGCGGAGGAGTCGTGTCGTGCCTGAGAGCGCAG |
| hSyn-2 promoter | 23 | CTGCAGAGGGCCCTGCGTATGAGTGCAAGTGGGTTTTAGGACCAGG |
| (449 bp) | | ATGAGGCGGGGTGGGGGTGCCTACCTGACGACCGACCCCGACCCAC |
| | | TGGACAAGCACCCAACCCCCATTCCCCAAATTGCGCATCCCCTATC |
| | | AGAGAGGGGGAGGGGAAACAGGATGCGGCGAGGCGCGTGCGCACTG |
| | | CCAGCTTCAGCACCGCGGACAGTGCCTTCGCCCCCGCCTGGCGGCG |
| | | CGCGCCACCGCCGCCTCAGCACTGAAGGCGCGCTGACGTCACTCGC |
| | | CGGTCCCCCGCAAACTCCCCTTCCCGGCCACCTTGGTCGCGTCCGC |
| | | GCCGCCGCCGGCCCAGCCGGACCGCACCACGCGAGGCGCGAGATAG |
| | | GGGGGCACGGGCGCGACCATCTGCGCTGCGGCGCCGGCGACTCAGC |
| | | GCTGCCTCAGTCTGC |
| hSyn-3 promoter | 24 | CTGCAGAGGGCCCTGCGTATGAGTGCAAGTGGGTTTTAGGACCAGG |
| (469 bp) | | ATGAGGCGGGGTGGGGGTGCCTACCTGACGACCGACCCCGACCCAC |
| | | TGGACAAGCACCCAACCCCCATTCCCCAAATTGCGCATCCCCTATC |
| | | AGAGAGGGGGAGGGGAAACAGGATGCGGCGAGGCGCGTGCGCACTG |
| | | CCAGCTTCAGCACCGCGGACAGTGCCTTCGCCCCCGCCTGGCGGCG |
| | | CGCGCCACCGCCGCCTCAGCACTGAAGGCGCGCTGACGTCACTCGC |
| | | CGGTCCCCCGCAAACTCCCCTTCCCGGCCACCTTGGTCGCGTCCGC |
| | | GCCGCCGCCGGCCCAGCCGGACCGCACCACGCGAGGCGCGAGATAG |
| | | GGGGGCACGGGCGCGACCATCTGCGCTGCGGCGCCGGCGACTCAGC |
| | | GCTGCCTCAGTCTGCGGTGGGCAGCGGAGGAGTCGTGTCGTGCCTG |
| | | AGAGCGCAGGGCGCGCC |
| hSyn-4 promoter | 25 | CTGCAGAGGGCCCTGCGTATGAGTGCAAGTGGGTTTTAGGACCAGG |
| 461 bp) | | ATGAGGCGGGGTGGGGGTGCCTACCTGACGACCGACCCCGACCCAC |
| | | TGGACAAGCACCCAACCCCCATTCCCCAAATTGCGCATCCCCTATC |
| | | AGAGAGGGGGAGGGGAAACAGGATGCGGCGAGGCGCGTGCGCACTG |
| | | CCAGCTTCAGCACCGCGGACAGTGCCTTCGCCCCCGCCTGGCGGCG |
| | | CGCGCCACCGCCGCCTCAGCACTGAAGGCGCGCTGACGTCACTCGC |
| | | CGGTCCCCCGCAAACTCCCCTTCCCGGCCACCTTGGTCGCGTCCGC |
| | | GCCGCCGCCGGCCCAGCCGGACCGCACCACGCGAGGCGCGAGATAG |
| | | GGGGGCACGGGCGCGACCATCTGCGCTGCGGCGCCGGCGACTCAGC |
| | | GCTGCCTCAGTCTGCCAATTGCAGCGGAGGAGTCGTGTCGTGCCTG |
| | | AGAGCGCAG |
| hSyn-5 promoter | 26 | CCTGCAGGGCCCACTAGTATCTGCAGAGGGCCCTGCGTATGAGTGC |
| (571 bp) | | AAGTGGGTTTTAGGACCAGGATGAGGCGGGGTGGGGGTGCCTACCT |
| | | GACGACCGACCCCGACCCACTGGACAAGCACCCAACCCCCATTCCC |
| | | CAAATTGCGCATCCCCTATCAGAGAGGGGGAGGGGAAACAGGATGC |
| | | GGCGAGGCGCGTGCGCACTGCCAGCTTCAGCACCGCGGACAGTGCC |
| | | TTCGCCCCCGCCTGGCGGCGCGCGCCACCGCCGCCTCAGCACTGAA |
| | | GGCGCGCTGACGTCACTCGCCGGTCCCCCGCAAACTCCCCTTCCCG |
| | | GCCACCTTGGTCGCGTCCGCGCCGCCGCCGGCCCAGCCGGACCGCA |
| | | CCACGCGAGGCGCGAGATAGGGGGGCACGGGCGCGACCATCTGCGC |
| | | TGCGGCGCCGGCGACTCAGCGCTGCCTCAGTCTGCGGTGGGCAGCG |
| | | GAGGAGTCGTGTCGTGCCTGAGAGCGCAGCTGTGCTCCTGGGCACC |
| | | GCGCAGTCCGCCCCCGCGGCTCCTGGCCAGACCACCCCTAGGACCC |
| | | CCTGCCCCAAGTCGCAGCC |
| Mecp2 promoter | 27 | AGCTGAATGGGGTCCGCCTCTTTTCCCTGCCTAAACAGACAGGAAC |
| | | TCCTGCCAATTGAGGGCGTCACCGCTAAGGCTCCGCCCCAGCCTGG |
| | | GCTCCACAACCAATGAAGGGTAATCTCGACAAAGAGCAAGGGGTGG |
| | | GGCGCGGGCGCGCAGGTGCAGCAGCACACAGGCTGGTCGGGAGGGC |
| | | GGGGCGCGACGTCTGCCGTGCGGGGTCCCGGCATCGGTTGCGCGC |
| hGFAP promoter | 28 | GTCTGCAAGCAGACCTGGCAGCATTGGGCTGGCCGCCCCCCAGGGC |
| | | CTCCTCTTCATGCCCAGTGAATGACTCACCTTGGCACAGACACAAT |
| | | GTTCGGGGTGGGCACAGTGCCTGCTTCCCGCCGCACCCCAGCCCCC |
| | | CTCAAATGCCTTCCGAGAAGCCCATTGAGTAGGGGGCTTGCATTGC |
| | | ACCCCAGCCTGACAGCCTGGCATCTTGGGATAAAAGCAGCACAGCC |
| | | CCCTAGGGGCTGCCCTTGCTGTGTGGCGCCACCGGCGGTGGAGAAC |
| | | AAGGCTCTATTCAGCCTGTGCCCAGGAAAGGGGATCAGGGGATGCC |
| | | CAGGCATGGACAGTGGGTGGCAGGGGGGGAGAGGAGGGCTGTCTGC |
| | | TTCCCAGAAGTCCAAGGACACAAATGGGTGAGGGGACTGGGCAGGG |
| | | TTCTGACCCTGTGGGACCAGAGTGGAGGGCGTAGATGGACCTGAAG |
| | | TCTCCAGGGACAACAGGGCCCAGGTCTCAGGCTCCTAGTTGGGCCC |
| | | AGTGGCTCCAGCGTTTCCAAACCCATCCATCCCCAGAGGTTCTTCC |
| | | CATCTCTCCAGGCTGATGTGTGGGAACTCGAGGAAATAAATCTCCA |
| | | GTGGGAGACGGAGGGGTGGCCAGGGAAACGGGGCGCTGCAGGAATA |
| | | AAGACGAGCCAGCACAGCCAGCTCATGCGTAACGGCTTTGTGGAGC |
| | | TGTCAAGGCCTGGTCTCTGGGAGAGAGGCACAGGGAGGCCAGACAA |
| | | GGAAGGGGTGACCTGGAGGGACAGATCCAGGGGCTAAAGTCCTGAT |
| | | AAGGCAAGAGAGTGCCGGCCCCCTCTTGCCCTATCAGGACCTCCAC |
| | | TGCCACATAGAGGCCATGATTGACCCTTAGACAAAGGGCTGGTGTC |
| | | CAATCCCAGCCCCCAGCCCCAGAACTCCAGGGAATGAATGGGCAGA |
| | | GAGCAGGAATGTGGGACATCTGTGTTCAAGGGAAGGACTCCAGGAG |
| | | TCTGCTGGGAATGAGGCCTAGTAGGAAATGAGGTGGCCCTTGAGGG |
| | | TACAGAACAGGTTCATTCTTCGCCAAATTCCCAGCACCTTGCAGGC |
| | | ACTTACAGCTGAGTGAGATAATGCCTGGGTTATGAAATCAAAAAGT |
| | | TGGAAAGCAGGTCAGAGGTCATCTGGTACAGCCCTTCCTTCCCTTT |
| | | TTTTTTTTTTTTTTTTTTTGTGAGACAAGGTCTCTCTCTGTTGCCC |
| | | AGGCTGGAGTGGCGCAAACACAGCTCACTGCAGCCTCAACCTACTG |
| | | GGCTCAAGCAATCCTCCAGCCTCAGCCTCCCAAAGTGCTGGGATTA |
| | | CAAGCATGAGCCACCCCACTCAGCCCTTTCCTTCCTTTTTAATTGA |
| | | TGCATAATAATTGTAAGTATTCATCATGGTCCAACCAACCCTTTCT |
| | | TGACCCACCTTCCTAGAGAGAGGGTCCTCTTGATTCAGCGGTCAGG |
| | | GCCCCAGACCCATGGTCTGGCTCCAGGTACCACCTGCCTCATGCAG |
| | | GAGTTGGCGTGCCCAGGAAGCTCTGCCTCTGGGCACAGTGACCTCA |
| | | GTGGGGTGAGGGGAGCTCTCCCCATAGCTGGGCTGCGGCCCAACCC |
| | | CACCCCCTCAGGCTATGCCAGGGGGTGTTGCCAGGGGCACCCGGGC |
| | | ATCGCCAGTCTAGCCCACTCCTTCATAAAGCCCTCGCATCCCAGGA |
| | | GCGAGCAGAGCCAGAGCAT |
| Rat NSE/RU5′ | 29 | AGCTCTGAGCTCCTCCTCTGCTCGCCCAATCCTTCCAACCCCCTAT |
| promoter | | GGTGGTATGGCTGACACAGAAAATGTCTGCTCCTGTATGGGACATT |
| (1743 bp) | | TGCCCCTCTTCTCCAAATATAAGACAGGATGAGGCCTAGCTTTTGC |
| | | TGCTCCAAAGTTTTAAAAGAACACATTGCACGGCATTTAGGGACTC |
| | | TAAAGGGTGGAGGAGGAATGAGGGAATTGCATCATGCCAAGGCTGG |
| | | TCCTCATCCATCACTGCTTCCAGGGCCCAGAGTGGCTTCCAGGAAG |
| | | TATTCTTACAAAGGAAGCCCGATCTGTAGCTAACACTCAGAGCCCA |
| | | TTTTCCTGCGTTAACCCCTCCCGACCTCATATACAGGAGTAACATG |
| | | ATCAGTGACCTGGGGGAGCTGGCCAAACTGCGGGACCTGCCCAAGC |
| | | TGAGGGCCTTGGTGCTGCTGGACAACCCCTGTGCCGATGAGACTGA |
| | | CTACCGCCAGGAGGCCCTGGTGCAGATGGCACACCTAGAGCGCCTA |
| | | GACAAAGAGTACTATGAGGACGAGGACCGGGCAGAAGCTGAGGAGA |
| | | TCCGACAGAGGCTGAAGGAGGAACAGGAGCAAGAACTCGACCCGGA |
| | | CCAAGACATGGAACCGTACCTCCCGCCAACTTAGTGGCTCCTCTAG |
| | | CCTGCAGGGACAGTAAAGGTGATGGCAGGAAGGCAGCCCCCGGAGG |
| | | TCAAAGGCTGGGCACGCGGGAGGAGAGGCCAGAGTCAGAGGCTGCG |
| | | GGTATCTCAGATATGAAGGAAAGATGAGAGAGGCTCAGGAAGAGGT |
| | | AAGAAAAGACACAAGAGACCAGAGAAGGGAGAAGAATTAGAGAGGG |
| | | AGGCAGAGGACCGCTGTCTCTACAGACATAGCTGGTAGAGACTGGG |
| | | AGGAAGGGATGAACCCTGAGCGCATGAAGGGAAGGAGGTGGCTGGT |
| | | GGTATATGGAGGATGTAGCTGGGCCAGGGAAAAGATCCTGCACTAA |
| | | AAATCTGAAGCTAAAAATAACAGGACACGGGGTGGAGAGGCGAAAG |
| | | GAGGGCAGAGTGAGGCAGAGAGACTGAGAGGCCTGGGGATGTGGGC |
| | | ATTCCGGTAGGGCACACAGTTCACTTGTCTTCTCTTTTTCCAGGAG |
| | | GCCAAAGATGCTGACGTCAAGAACTCATAATACCCCAGTGGGGACC |
| | | ACCGCATTCATAGCCCTGTTACAAGAAGTGGGAGATGTTCCTTTTT |
| | | GTCCCAGACTGGAAATCCGTTACATCCCGAGGCTCAGGTTCTGTGG |
| | | TGGTCATCTCTGTGTGGCTTGTTCTGTGGGCCTACCTAAAGTCCTA |
| | | AGCACAGCTCTCAAGCAGATCCGAGGCGACTAAGATGCTAGTAGGG |
| | | GTTGTCTGGAGAGAAGAGCCGAGGAGGTGGGCTGTGATGGATCAGT |
| | | TCAGCTTTCAAATAAAAAGGCGTTTTTATATTCTGTGTCGAGTTCG |
| | | TGAACCCCTGTGGTGGGCTTCTCCATCTGTCTGGGTTAGTACCTGC |
| | | CACTATACTGGAATAAGGGGACGCCTGCTTCCCTCGAGTTGGCTGG |
| | | ACAAGGTTATGAGCATCCGTGTACTTATGGGGTTGCCAGCTTGGTC |
| | | CTGGATCGCCCGGGCCCTTCCCCCACCCGTTCGGTTCCCCACCACC |
| | | ACCCGCGCTCGTACGTGCGTCTCCGCCTGCAGCTCTTGACTCATCG |
| | | GGGCCCCCGGGTCACATGCGCTCGCTCGGCTCTATAGGCGCCGCCC |
| | | CCTGCCCACCCCCCGCCCGCGCTGGGAGCCGCAGCCGCCGCCACTC |
| | | CTGCTCTCTCTGCGCCGAAGCTTCGAGGGGCTCGCATCTCTCCTTC |
| | | ACGCGCCCGCCGCCCTACCTGAGGCCGCCATCCACGCCGGTTGAGT |
| | | CGCGTTCTGCCGCCTCCCGCCTGTGGTGCCTCCTGAACTGCGTCCG |
| | | CCGTCTAGGTAAGTTTAAAGCTCAGGTCGAGACCGGGCCTTTGTCC |
| | | GGCGCTCCCTTGGAGCCTACCTAGACTCAGCCGGCTCTCCACGCTT |
| | | TGCCTGACCCTGCTTGCTCAACTCTACGTCTTTGTTTCGTTTTCTG |
| | | TTCTGCGCCGTTACAGATC |
| NeuN | 30 | GAGGAGGAGGAGAGAGACCGGGAGGGCGCCCGGGAGGCAGGGCGCG |
| (H. sapiens) | | CGCACACTCCGAGG |
| NG_053112.1 | | |
| CamKII | 31 | GATGCTGACGAAGGCTCGCGAGGCTGTGAGCAGCCACAGTGCCCTG |
| (α; H. sapiens) | | CTCAGAAGCCCCGG |
| NM_171825 | | |
| CamKII | 32 | ACTTGTGGACTAAGTTTGTTCGCATCCCCTTCTCCAACCCCCTCAG |
| (α; M. musculus) | | TACATCACCCTGGGGGAACAGGGTCCACTTGCTCCTGGGCCCACAC |
| 7625-7988: | | AGTCCTGCAGTATTGTGTATATAAGGCCAGGGCAAAGAGGAGCAGG |
| GenBank | | TTTTAAAGTGAAAGGCAGGCAGGTGTTGGGGAGGCAGTTACCGGGG |
| AJ222796 | | CAACGGGAACAGGGCGTTTCGGAGGTGGTTGCCATGGGGACCTGGA |
| (364 bp) | | TGCTGACGAAGGCTCGCGAGGCTGTGAGCAGCCACAGTGCCCTGCT |
| Hioki et al* | | CAGAAGCCCCAAGCTCGTCAGTCAAGCCGGTTCTCCGTTTGCACTC |
| | | AGGAGCACGGGCAGGCGAGTGGCCCCTAGTTCTGGGGGCAGC |
| CamKII | 33 | GTCTCCCGCGCCCGCGCCCGTGTCGCCGCCGTGCCCGCGAGCGGGA |
| (β1; H. sapiens) | | GCCGGAGTCGCCGC |
| NM_172084 | | |
| CamKII | 34 | CGTGTGCAGATGCAGGGCGCCGGTGCCCTGCGGGTGCGGGTGCAGG |
| (β2; H. sapiens) | | AGCAGCGTGTGCAG |
| NM_172084 | | |
| CamKII | 35 | CCCCACGCCACCCTTTCTGGTCATCTCCCCTCCCGCCCCGCCCCTG |
| (δ; H. sapiens) | | CGCACACTCCCTCG |
| NM_172115 | | |
| CamKII | 36 | TCTCCCCGGTAAAGTCTCGCGGTGCTGCCGGGCTCAGCCCCGTCTC |
| (γ; H. sapiens) | | CTCCTCTTGCTCCC |
| NM_172171 | | |
| NSE/ENO2 | 37 | CGCCTCCTCCGCCCGCCGCCCGGGAGCCGCAGCCGCCGCCGCCACT |
| (isoform 1; H. | | GCCACTCCCGCTCT |
| sapiens) | | |
| NM_001975 | | |
| NSE/ENO2 | 38 | TGGGTGCCCCCACCCTTCCCCCATCCTCCTCCCTTCCCCACTCCAC |
| (isoform 2; H. | | CCTCGTCGGTCCCC |
| sapiens) | | |
| NM_001975 | | |
| PDGFB | 39 | AAAAAAAAAAAAAAAGCCCACCCTCCAGCCTCGCTGCAAAGAGAAA |
| (isoform 1; H. | | ACCGGAGCAGCCGC |
| sapiens) | | |
| NM_033016 | | |
| PDGFB | 40 | TCTCGCACTCTCCCTTCTCCTTTATAAAGGCCGGAACAGCTGAAAG |
| (isoform 2; H. | | GGTGGCAACTTCTC |
| sapiens) | | |
| NM_033016 | | |
| PDGFB | 41 | GCCGCGTCCACCTGTCGGCCGGGCCCAGCCGAGCGCGCAGCGGGCA |
| (isoform 3; H. | | CGCCGCGCGCGCGG |
| sapiens) | | |
| NM_033016 | | |
| VGluT1/SLC17A7 | 42 | GCGCCCCGCCCCCGGCGCTGAGTCCTGTGACAGCCCCCGGGCCGCC |
| (H. sapiens) | | TGCACTTGCAGCCT |
| NM_020309 | | |
| VGluT2/SLC17A6 | 43 | AAAGAAGAGTCCCCTATTCCTGAAACTTACTCTGTCCGTGGTGCTG |
| (isoform 1; H. | | AAACATTGTACCGA |
| sapiens) | | |
| NM_020346 | | |
| VGluT2/SLC17A6 | 44 | CGTCCTCAAAGAGCAGCAAGCCTTCTCCATCTTAATTTGACTCTAC |
| (isoform 2; H. | | CGCAGAGCAGACTT |
| sapiens) | | |
| NM_020346 | | |
| VGluT2/SLC17A6 | 45 | ATGCAGCTATTCTGTTGTATTCTCATTCTCACTCTCCCTCCCTTCT |
| (isoform 3; H. | | CTCACTCTCACTCT |
| sapiens) | | |
| NM_020346 | | |
| VGluT3/SLC17A8 | 46 | CATGTTAGCGTCCCCAGCTGCAGCCCAGGGAGGGAGAGAGGCTGCG |
| (H. sapiens) | | CTCAGTCTGAGAGT |
| NM_001145288 | | |
| SST | 47 | TGACGTCAGAGAGAGAGTTTAAAACAGAGGGAGACGGTTGAGAGCA |
| (isoform 1; H. | | CACAAGCCGCTTTA |
| sapiens) | | |
| NM_001048 | | |
| SST | 48 | GAGTGAAAATAAAAGATTGTATAAATCGTGGGGCATGTGGAATTGT |
| (isoform 2; H. | | GTGTGCCTGTGCGT |
| sapiens) | | |
| NM_001048 | | |
| NPY | 49 | GCCGCGGCGAGGAAGCTCCATAAAAGCCCTGTCGCGACCCGCTCTC |
| (H. sapiens) | | TGCACCCCATCCGC |
| NM_000905 | | |
| VIP | 50 | CAGTCCTAAGTATAAGCCCTATAAAATGATGGGCTTTGAAATGCTG |
| (isoform 1; H. | | GTCAGGGTAGAGTG |
| sapiens) | | |
| NM_194435 | | |
| VIP | 51 | TTTTCCATTAATGTTTTCAGACTGCTGTTGACCACAGGTAACTGAA |
| (isoform 2; H. | | ATCATGGAAAGAGA |
| sapiens) | | |
| NM_194435 | | |
| PV | 52 | TGGTCATATGAGCAGAAATGATGAGAAAAGCACTTTTTAATCTTTT |
| (isoform 1; H. | | CGCACTTGCTCTGC |
| sapiens) | | |
| NM_002854 | | |
| PV | 53 | AATAGCCAGAGCAGAAGCCTATATAGGTGGCCATCCCACCTCCAGG |
| (isoform 2; H. | | CTCACTTCCCGACA |
| sapiens) | | |
| NM_002854 | | |
| PV | 54 | CAGCGCTCAGATTTTGCAGCATAAATTTGCATCCAGGACAGACCAG |
| (isoform 3; H. | | AGCAGAGGCTGAGG |
| sapiens) | | |
| NM_002854 | | |
| GAD65/GAD2 | 55 | GCACGCACGCGCGCGCAGGGCCAAGCCCGAGGCAGCTCGCCCGCAG |
| (isoform 1; H. | | CTCGCACTCGCAGG |
| sapiens) | | |
| NM_001134366 | | |
| GAD65/GAD2 | 56 | CCCGCCTCTGGCTCGCCCGAGGACGCGCTGGCACGCCTCCCACCCC |
| (isoform 2 H. | | CTCACTCTGACTCC |
| sapiens) | | |
| NM_001134366 | | |
| GAD65/GAD2 | 57 | CACTGGGCTCCCTTTCCCTCAAATGCTCTGGGGCTCTCCGCGCTTT |
| (isoform 3; H. | | CCTGAGTCCGGGCT |
| sapiens) | | |
| NM_001134366 | | |
| GAD65/GAD2 | 58 | CACAGAAAACTCCTCTGGGCCACGCTTCCCGCCTCGCCGAGGTCTC |
| (isoform 4; H. | | CCCAGTCTGCCCCT |
| sapiens) | | |
| NM_001134366 | | |
| GAD67/GAD1 | 59 | CTCTGCCCCCGCCTACCCCGGAGCCGTGCAGCCGCCTCTCCGAATC |
| (isoform 1 H. | | TCTCTCTTCTCCTG |
| sapiens) | | |
| NM_013445 | | |
| GAD67/GAD1 | 60 | CTGGATTTATAATCGCCCTATAAAGCTCCAGAGGCGGTCAGGCACC |
| (isoform 2; H. | | TGCAGAGGAGCCCC |
| sapiens) | | |
| NM_013445 | | |
| DRD1 | 61 | GGGACGCGCGGGCGGGGTGGGCTGTGCCCCGCGGGAACCCCGCCGG |
| (H. sapiens) | | CCTGTGCGCTTGCTG |
| NM_000794 | | |
| DRD2 | 62 | CTCCCTCCCGCGCTCCCCGCGCTCGGGCGCCGCAGAGCTGTCCAGC |
| (isoform 1; H. | | TTCAGTGCCGAACC |
| sapiens) | | |
| NM_016574 | | |
| DRD2 | 63 | GTACTGGTGTACAAGGACAAGGTGACTTTTTTTCTTTTCCCAGATT |
| (isoform 2; H. | | GAAAGGGCCAAAGA |
| sapiens) | | |
| NM_016574 | | |
| C1ql2 | 64 | CCTCCGCCGCTCAGCCCCGGACTCCTTACGTCAGGGTAGCGGGGTC |
| (H. sapiens) | | CCCCCTCCGCGCGG |
| NM_182528 | | |
| POMC | 65 | CCAGGAGAGCTCGGCAAGTATATAAGGACAGAGGAGCGCGGGACCA |
| (H. sapiens) | | AGCGGCGGCGAAGG |
| NM_001319204 | | |
| PROX1 | 66 | TTCCTTCAGCTGTGTCTTAAAGTAAATCTTGTTGTGGAGCGGAGCC |
| (isoform 1; H. | | CTCAGCTGAGGGAG |
| sapiens) | | |
| NM_002763 | | |
| PROX1 | 67 | GTAAGTATCTTCTTCTTCCCCTCGTGAGTCCCTCCCCTTTTCCAGA |
| (isoform 2) | | ATCACTTGCACTGT |
| NM_002763 | | |
| MAP1B | 68 | GGGGCGGAGCGGAGACAGTACCTTCGGAGATAATCCTTTCTCCTGC |
| (isoform 1; H. | | CGCAGTGGAGAGGA |
| sapiens) | | |
| NM_005909 | | |
| MAP1B | 69 | CCCTGCCTAGTCTCCATATAAAAGCGGCGCCGCCTCCCCGCCCTCT |
| (isoform 2; H. | | CTCACTCCCCGCTC |
| sapiens) | | |
| NM_005909 | | |
| MAP1B | 70 | GGGCGGCCCAGCCCCAGGTTACGTCGTCCCCAGAAAGAATCTGGCC |
| (isoform 3; H. | | AACAGTCTGGCCGT |
| sapiens) | | |
| NM_005909 | | |
| Tα-1/TUBA1A | 71 | GGCAGGTTCTCTTACATCGACCGCTTAAGAGTCGCGCTGTAAGAAG |
| (isoform 1; H. | | CAACACCTCCTCCTCGCCTCCGCCATCCACCCGGCAGCCGCGAAGC |
| sapiens) | | AGCAACC |
| NM_006009 | | |
| CK8 | 72 | CCACTACGGGTTTAGGCTGCCCATGTAAGGAGGCAAGGCCTGGGGA |
| | | CACCCGAGATGCCTGGTTATAATTAACCCAGACATGTGGCTGCCCC |
| | | CCCCCCCCCCAACACCTGCTGCCTCTAAAAATAACCCTGTCCCTGG |
| | | TGGATCCCACTACGGGTTTAGGCTGCCCATGTAAGGAGGCAAGGCC |
| | | TGGGGACACCCGAGATGCCTGGTTATAATTAACCCAGACATGTGGC |
| | | TGCCCCCCCCCCCCCCAACACCTGCTGCCTCTAAAAATAACCCTGT |
| | | CCCTGGTGGATCCCACTACGGGTTTAGGCTGCCCATGTAAGGAGGC |
| | | AAGGCCTGGGGACACCCGAGATGCCTGGTTATAATTAACCCAGACA |
| | | TGTGGCTGCCCCCCCCCCCCCCAACACCTGCTGCCTCTAAAAATAA |
| | | CCCTGTCCCTGGTGGATCCCCTGCATGCGAAGATCTTCGAACAAGG |
| | | CTGTGGGGGACTGAGGGCAGGCTGTAACAGGCTTGGGGGCCAGGGC |
| | | TTATACGTGCCTGGGACTCCCAAAGTATTACTGTTCCATGTTCCCG |
| | | GCGAAGGGCCAGCTGTCCCCCGCCAGCTAGACTCAGCACTTAGTTT |
| | | AGGAACCAGTGAGCAAGTCAGCCCTTGGGGCAGCCCATACAAGGCC |
| | | ATGGGGCTGGGCAAGCTGCACGCCTGGGTCCGGGGTGGGCACGGTG |
| | | CCCGGGCAACGAGCTGAAAGCTCATCTGCTCTCAGGGGCCCCTCCC |
| | | TGGGGACAGCCCCTCCTGGCTAGTCACACCCTGTAGGCTCCTCTAT |
| | | ATAACCCAGGGGCACAGGGGCTGCCCTCATTCTACCACCACCTCCA |
| | | CAGCACAGACAGACACTCAGGAGCCAGCCAGCGTCGA |
| mU1a | 73 | ATGGAGGCGGTACTATGTAGATGAGAATTCAGGAGCAAACTGGGAA |
| | | AAGCAACTGCTTCCAAATATTTGTGATTTTTACAGTGTAGTTTTGG |
| | | AAAAACTCTTAGCCTACCAATTCTTCTAAGTGTTTTAAAATGTGGG |
| | | AGCCAGTACACATGAAGTTATAGAGTGTTTTAATGAGGCTTAAATA |
| | | TTTACCGTAACTATGAAATGCTACGCATATCATGCTGTTCAGGCTC |
| | | CGTGGCCACGCAACTCATACT |
| EF-1α | 74 | GGGCAGAGCGCACATCGCCCACAGTCCCCGAGAAGTTGGGGGGAGG |
| | | GGTCGGCAATTGAACGGGTGCCTAGAGAAGGTGGCGCGGGGTAAAC |
| | | TGGGAAAGTGATGTCGTGTACTGGCTCCGCCTTTTTCCCGAGGGTG |
| | | GGGGAGAACCGTATATAAGTGCAGTAGTCGCCGTGAACGTTCTTTT |
| | | TCGCAACGGGTTTGCCGCCAGAACACAG |
| TBG | 75 | GGGCTGGAAGCTACCTTTGACATCATTTCCTCTGCGAATGCATGTA |
| | | TAATTTCTACAGAACCTATTAGAAAGGATCACCCAGCCTCTGCTTT |
| | | TGTACAACTTTCCCTTAAAAAACTGCCAATTCCACTGCTGTTTGGC |
| | | CCAATAGTGAGAACTTTTTCCTGCTGCCTCTTGGTGCTTTTGCCTA |
| | | TGGCCCCTATTCTGCCTGCTGAAGACACTCTTGCCAGCATGGACTT |
| | | AAACCCCTCCAGCTCTGACAATCCTCTTTCTCTTTTGTTTTACATG |
| | | AAGGGTCTGGCAGCCAAAGCAATCACTCAAAGTTCAAACCTTATCA |
| | | TTTTTTGCTTTGTTCCTCTTGGCCTTGGTTTTGTACATCAGCTTTG |
| | | AAAATACCATCCCAGGGTTAATGCTGGGGTTAATTTATAACTAAGA |
| | | GTGCTCTAGTTTTGCAATACAGGACATGCTATAAAAATGGAAAGAT |
| ApoE.hAAT | 76 | AGGCTCAGAGGCACACAGGAGTTTCTGGGCTCACCCTGCCCCCTTC |
| | | CAACCCCTCAGTTCCCATCCTCCAGCAGCTGTTTGTGTGCTGCCTC |
| | | TGAAGTCCACACTGAACAAACTTCAGCCTACTCATGTCCCTAAAAT |
| | | GGGCAAACATTGCAAGCAGCAAACAGCAAACACACAGCCCTCCCTG |
| | | CCTGCTGACCTTGGAGCTGGGGCAGAGGTCAGAGACCTCTCTGGGC |
| | | CCATGCCACCTCCAACATCCACTCGACCCCTTGGAATTTCGGTGGA |
| | | GAGGAGCAGAGGTTGTCCTGGCGTGGTTTAGGTAGTGTGAGAGGGG |
| | | TACCCGGGGATCTTGCTACCAGTGGAACAGCCACTAAGGATTCTGC |
| | | AGTGAGAGCAGAGGGCCAGCTAAGTGGTACTCTCCCAGAGACTGTC |
| | | TGACTCACGCCACCCCCTCCACCTTGGACACAGGACGCTGTGGTTT |
| | | CTGAGCCAGGTACAATGACTCCTTTCGGTAAGTGCAGTGGAAGCTG |
| | | TACACTGCCCAGGCAAAGCGTCCGGGCAGCGTAGGCGGGCGACTCA |
| | | GATCCCAGCCAGTGGACTTAGCCCCTGTTTGCTCCTCCGATAACTG |
| | | GGGTGACCTTGGTTAATATTCACCAGCAGCCTCCCCCGTTGCCCCT |
| | | CTGGATCCACTGCTTAAATACGGACGAGGACAGGGCCCTGTCTCCT |
| | | CAGCTTCAGGCACCACCACTGACCTGGGACAGT |
| pTetbidi | 343 | TTACCCGGGGAGCATGTCAAGGTCAAAATCGTCAAGAGCGTCAGCA |
| | | GGCAGCATATCAAGGTCAAAGTCGTCAAGGGCATCGGCTGGGAGCA |
| | | TGTCTAAGTCAAAATCGTCAAGGGCGTCGGTCGGCCCGCCGCTTTC |
| | | GCACTTTAGCTGTTTCTCCAGGCCACATATGATTAGTTCCAGGCCG |
| | | AAAAGGAAGGCAGGTTCGGCTCCCTGCCGGTCGAACAGCTCAATTG |
| | | CTTGTTTCAGAAGTGGGGGCATAGAATCGGTGGTAGGTGTCTCTCT |
| | | TTCCTCTTTTGCTACTTGATGCTCCTGTTCCTCCAATACGCAGCCC |
| | | AGTGTAAAGTGGCCCACGGCGGACAGAGCGTACAGTGCGTTCTCCA |
| | | GGGAGAAGCCTTGCTGACACAGGAACGCGAGCTGATTTTCCAGGGT |
| | | TTCGTACTGTTTCTCTGTTGGGCGGGTGCCGAGATGCACTTTAGCC |
| | | CCGTCGCGATGTGAGAGGAGAGCACAGCGGTATGACTTGGCGTTGT |
| | | TCCGCAGAAAGTCTTGCCATGACTCGCCTTCCAGGGGGCAGGAGTG |
| | | GGTATGATGCCTGTCCAGCATCTCGATTGGCAGGGCATCGAGCAGG |
| | | GCCCGCTTGTTCTTCACGTGCCAGTACAGGGTAGGCTGCTCAACTC |
| | | CCAGCTTTTGAGCGAGTTTCCTTGTCGTCAGGCCTTCGATACCGAC |
| | | TCCATTGAGTAATTCCAGAGCAGAGTTTATGATTTTGCTCTTGTCC |
| | | AGTCTAGACAT |
| Furin-T2A | 77 | AGAAAGAGAAGAGGCTCTGGAGAAGGCAGAGGCTCCCTGCTGACAT |
| | | GTGGGGATGTTGAAGAGAATCCTGGGCCT |
| Furin | 78 | AGAAAGAGAAGA |
| Furin-GSG | 79 | AGAAAGAGAAGAGGCTCTGGA |
| Linker | | |
| GSG | 80 | GGCTCTGGA |
| (GSG)₂ | 81 | GGCTCTGGAGGCTCTGGA |
| GGGGS | 82 | GGCGGAGGAGGCTCT |
| (G4S) | | |
| T2A | 83 | GAAGGCAGAGGCTCCCTGCTGACATGTGGGGATGTTGAAGAGAATC |
| | | CTGGGCCT |
| Rabbit ß-globin | 84 | GATCTTTTTCCCTCTGCCAAAAATTATGGGGACATCATGAAGCCCC |
| poly A | | TTGAGCATCTGACTTCTGGCTAATAAAGGAAATTTATTTTCATTGC |
| (signal in bold | | AATAGTGTGTTGGAATTTTTTGTGTCTCTCACTCG |
| type) | | |
| ß-globin PolyA | 85 | ATAAAGGAAATTTATTTTCATTGCAATAGTGTGTTGGAATTTTTTG |
| signal | | TGTCTCTCA |
| IL-2 leader | 86 | ATGTACAGAATGCAGCTGCTGCTGCTCATTGCCCTGTCTCTGGCCC |
| peptide v1 | | TGGTCACCAATTCT |

[0239] Ubiquitous, cell-type-specific, tissue-specific, developmental stage-specific, and conditional promoters, for example, drug-responsive promoters (e.g. tetracycline-responsive promoters) are all promoters potentially useful for Tau-specific antibody expression. The list provided (Table 8) is non-limiting and many promoters are well known in the art. In some embodiments, a portion or fragment of the promoter is included in the cis-acting plasmid or cassette. The portion or fragment of the promoter may be the transcriptionally active portion or fragment. Cell- and tissue specific promoter elements may be particularly suitable for expressing antibodies targeting Tau.

[0240] Exemplary promoters that are useful for the expression of the disclosed Tau-specific antibodies in mammalian cells (transduced with viral vector) include ubiquitous promoters such as, e.g., a phosphoglycerate kinase (PKG) promoter, CAG (composite of the (CMV) cytomegalovirus enhancer the chicken beta actin promoter (CBA) and the rabbit beta globin intron), the SV40 early promoter, murine mammary tumor virus LTR promoter; adenovirus major late promoter (Ad MLP); a herpes simplex virus (HSV) promoter, a CMV promoter such as the CMV immediate early promoter region (CMV-IE), rous sarcoma virus (RSV) promoter, and U6 promoter. For the purpose of driving cell-type specific expression of antibody sequences disclosed herein, cell-type specific promoters may be used. For example, neuron-specific expression of the antibodies can be conferred using neuronal-specific promoters, such as, e.g., a human synapsin 1 (hSyn) promoter (SEQ ID NO: 22), methyl CpG-binding protein 2 (Mecp2, SEQ ID NO: 27), GFAPNSE/RU5′ (SEQ ID NO: 28), hexaribonucleotide binding protein-3 (NeuN) promoter (SEQ ID NO: 30), Cα2+/calmodulin-dependent protein kinase II (CamKII) promoter (SEQ ID NOs: 31-36, Wang, L., Bai, J., & Hu, Y. (2007). Identification of the RA response element and transcriptional silencer in human αCaMKII promoter. Molecular Biology Reports, 35(1), 37-44), tubulin alpha I (Ta-1) promoter (SEQ ID NO: 71), neuron-specific enolase (NSE) promoter (SEQ ID NO: 29), platelet-derived growth factor beta chain (PDGFβ) promoter (SEQ ID NOs: 39-41), vesicular glutamate transporter (VGLUT) promoter (SEQ ID NOs: 42-46), somatostatin (SST) promoter (SEQ ID NO: 47), neuropeptide Y (NPY) promoter (SEQ ID NO: 49), vasoactive intestinal peptide (VIP) promoter (SEQ ID NOs: 50, 51), parvalbumin (PV) promoter (SEQ ID NOs: 42-54), glutamate decarboxylase (GAD65 or GAD67) promoter (SEQ ID Nos; 55-60), promoter of Dopamine-1 receptor (DRD1, SEQ ID NO: 61) and Dopamine-2 receptor (DRD2, SEQ ID NOs: 62, 63), microtubule-associated protein 1B (MAP1B, SEQ ID NOs: 68-70), complement component 1 q subcomponent-like 2 (Clq12) promoter (SEQ ID NO: 64), pro-opiomelanocortin (POMC) promoter (SEQ ID NO: 65), and prospero homeobox protein 1 (PROX1) promoter (SEQ ID NOs: 66, 67). Promoters suitable for driving polynucleotide expression specifically in astrocytes include Glial fibrillary acidic protein (GFAP)(Griffin, J M, et al. Gene Therapy (2019) 26:198-210), or variants thereof, e.g. GfaABC1D promoter, and ALDH1L1 (Koh, W. et al. Exp Neurobiol. 2017 December; 26(6):350-361). Promoters suitable for driving polynucleotide expression specifically in DG cells of the hippocampus include the Clql2, POMC, and PROX1 promoters. Synthetic promoters, hybrid promoters, and the like may also be used in conjunction with the methods and compositions disclosed herein. In addition, sequences derived from non-viral genes, such as the murine metallothionein gene, will also find use herein.

[0241] Such promoter sequences are commercially available from various sources, e.g., Stratagene (San Diego, CA) or InvivoGen (San Diego, CA), or may be engineered using standard molecular biology techniques. Exemplary promoter sequences suitable for use in expression vectors (e.g., plasmid or viral vector, such as, e.g., an AAV or a lentiviral vector) are provided in Table 8 above. Inducible promoters have been described, and provide regulatable transgene expression, including in the brain, utilizing, e.g. doxycycline-inducible viral vectors (Chtarto et al., Methods & Clinical Development (2016) 5, 16027; doi:10.1038/mtm.2016.27, SEQ ID NO: 343).

[0242] In some embodiments, a viral vector of the disclosure incorporates a promoter sequence. In a particular example, the promoter is a promoter selected from Table 8 having a nucleic acid sequence of SEQ ID NOs: 16, 19, 20, or 21 or a variant thereof having at least 70% (e.g., at least 70%, 75%, 80%, 85%, 90%, 91%, 92%, 93%, 94%, 95%, 96%, 97%, 98%, 99% or more) sequence identity to the nucleic acid sequence of SEQ ID NOs: 16, 19, 20, or 21.

[0243] In certain embodiments, a viral vector of the disclosure incorporates a CNS-specific promoter sequence. In a particular example, the CNS-specific promoter is a promoter selected from Table 8 having a nucleic acid sequence of SEQ ID NOs: 26, 27, 28, 39, 30, 31, 32, 33, 34, 35, 36, 37, 38, 39, 40, 41, 42, 43, 44, 45, 46, 47, 48, 49, 50, 51, 52, 53, 54, 55, 56, 57, 58, 59, 60, 61, 62, 63, 64, 65, 66, 67, 68, 69, 71, or 71 or a variant thereof having at least 70% (e.g., at least 70%, 75%, 80%, 85%, 90%, 91%, 92%, 93%, 94%, 95%, 96%, 97%, 98%, 99% or more) sequence identity to the nucleic acid sequence of SEQ ID NOs: 26, 27, 28, 39, 30, 31, 32, 33, 34, 35, 36, 37, 38, 39, 40, 41, 42, 43, 44, 45, 46, 47, 48, 49, 50, 51, 52, 53, 54, 55, 56, 57, 58, 59, 60, 61, 62, 63, 64, 65, 66, 67, 68, 69, 71, or 71. In another particular example, the CNS-specific promoter is a promoter selected from Table 8 comprising a nucleic acid sequence of SEQ ID NOs: 31, 32, 33, 34, 35, or 36 or comprising a variant thereof having at least 70% (e.g., at least 70%, 75%, 80%, 85%, 90%, 91%, 92%, 93%, 94%, 95%, 96%, 97%, 98%, 99% or more) sequence identity to the nucleic acid sequence of SEQ ID NOs: 31, 32, 33, 34, 35, or 36.

### 5.2.6. Signal Peptides

[0244] In certain embodiments, the vectors provided herein comprise components encoding signal peptides that modulate protein delivery. In certain embodiments, the viral vectors provided herein comprise nucleotides sequences encoding one or more signal peptides linked to the heavy and/or light chains being expressed. When the heavy and light chains are expressed as two polypeptides, each should have a signal peptide fused to its N terminus whereas if the anti-Tau binding protein is expressed as one polypeptide (for example as an scFv or scFv-Fc), then the signal peptide should be fused to the N terminus of that anti-Tau binding protein. Signal peptides may also be referred to herein as “leader sequences” or “leader peptides”. In certain embodiments, the signal peptides allow for the transgene product to achieve the proper packaging (e.g., glycosylation) in the cell. In certain embodiments, the signal peptides allow for the transgene product to achieve the proper localization in the cell. In certain embodiments, the signal peptides allow for the transgene product to achieve secretion from the cell.

[0245] There are two general approaches to select a signal sequence for protein production in a gene therapy context or in cell culture. One approach is to use a signal peptide from proteins homologous to the protein being expressed. For example, a human antibody signal peptide may be used to express IgGs in CHO or other cells. Another approach is to identify signal peptides optimized for the particular host cells used for expression. Signal peptides may be interchanged between different proteins or even between proteins of different organisms, but usually the signal sequences of the most abundant secreted proteins of that cell type are used for protein expression. For example, the signal peptide of human albumin, the most abundant protein in plasma, was found to substantially increase protein production yield in CHO cells. However, certain signal peptides may retain function and exert activity after being cleaved from the expressed protein as “post-targeting functions”. Thus, in certain embodiments, the signal peptide is selected from signal peptides of the most abundant proteins secreted by the cells used for expression to avoid the post-targeting functions. In a certain embodiment, the signal sequence is fused to both the heavy and light chain sequences. An exemplary sequence is MYRMQLLLLIALSLALVTNS (SEQ ID NO: 87) (see FIGS. 1D-F and Table 9). Alternatively, signal sequences that are appropriate for expression of the mAb or Fab in CNS tissue are provided in Table 9, respectively, below.

TABLE 9
Signal peptides suitable for expression in CNS tissue

| Signal Peptide | SEQ ID | |
|---|---|---|
| Origin | NO: | Sequence |
| Mutant IL2 signal | 87 | MYRMQLLLLIALSLALVINS |
| peptide | | |
| VEGF-A signal | 88 | MNFLLSWVHWSLALLLYLHHAKWSQA |
| peptide | | |
| Fibulin-1 signal | 89 | MERAAPSRRVPLPLLLLGGLALLAAGVDA |
| peptide | | |
| Vitronectin signal | 90 | MAPLRPLLILALLAWVALA |
| peptide | | |
| Complement Factor | 91 | MRLLAKIICLMLWAICVA |
| H signal peptide | | |
| Opticin signal | 92 | MRLLAFLSLLALVLQETGT |
| peptide | | |
| Albumin signal | 93 | MKWVTFISLLFLESSAYS |
| peptide | | |
| Chymotrypsinogen | 94 | MAFLWLLSCWALLGTTFG |
| signal peptide | | |
| Interleukin-2 signal | 95 | MYRMQLLSCIALILALVINS |
| peptide | | |
| Trypsinogen-2 | 96 | MNLLLILTFVAAAVA |
| signal peptide | | |

### 5.3. CNS Delivery

[0246] The antibody gene therapies stem from the surprisingly discovered several antibodies with unique binding specificities, e.g. binding Tau in the brain tissue of patients with Alzheimer's Disease (AD), Progressive supranuclear palsy (PSP) as well as Prick's Disease (PiD) as evidenced by capturing Tau and AD-associated Tau in an immunoprecipitation assay with brain extracts of patients with AD. The antibody gene therapies described herein are suitable for administration to the CNS, or are administered systemically with ensuing blood-brain-barrier crossing of the rAAV encapsidating the antibody gene, or crossing of the therapeutic antibody expressed by rAAV transduced cells outside the CNS.

[0247] Accordingly, provided are methods of administration to the CNS, e.g. intracerebroventricular (ICV), intracisternal (IC), including direct injection into the cisterna magna, lumbar intrathecal (IT) or intraparenchymal administration, and following transduction, the vector's production of the protein product is enhanced by an expression cassette employing engineered CNS-specific nucleic acid regulatory elements. In other examples, the rAAV vector may cross the blood brain barrier if provided systemically by intravenous, intramuscular, and/or intra-peritoneal administration. In other embodiments, the rAAV is administered such that it is delivered to the liver where it transduces liver cells generating a depot of cells producing the anti-Tau binding mAbs and secreting them into the circulation where they are then delivered to the CNS.

[0248] To further enhance transduction of target cells to express the antibody, particularly brain cells, the rAAV genome cassette comprises CNS-specific, such as neuron-specific promoters and/or enhancers. Exemplary CNS-specific promoters are provided in Table 8

### 5.4. Cellular Expression of Transgene

[0249] Another aspect of the present invention relates to nucleic acid expression cassettes comprising cell-specific promoters, e.g. CNS cell-specific promoters. Combinations of promoter and enhancer sequences may improve transgene expression while maintaining cellular and tissue specificity. Because the nucleic acid sequences encoding Tau-specific mAbs, and regulatory and structural elements, will be provided and delivered to cells as an expression cassette, the target cells become a permanent depot that continuously expresses, or supplies, the human mAb, e.g., human-glycosylated, transgene product. Thus, upon viral vector transduction, the Tau-specific mAb becomes a product of the target cells within the target tissue. Cells of the CNS, such as neurons and astrocytes (glial cells), are also secretory cells capable of expressing a heterologous gene and secreting into the extracellular space (Merienne, N. et al, 2013, Front Cell Neurosci, 7:106; Drinkut A, et al, 2012, Mol Ther. 20:534-43; Griffin, J M, et al. 2019, Gene Therapy, 26:198-210).

[0250] The molecular format of the antibody gene, engineering the antibody structure and that of the expression cassette elements, determines the mechanistic nature of the gene and its interaction in and outside of the cell. It has been shown that different forms of antibody, either whole antibodies or single chain variable fragments (scFv), scFv-IgG (also known as scFv-Fc) or other, can be successfully delivered to the CNS for various indications (Elmer, M., et al, Dec. 30, 2019, PLoS ONE 14(12): e0226245; Hay, C. E. et al, 2018 PLoS ONE 13(6): e0200060; Hay, C. E. et al, 2020 J Pharmacol Exp Ther 374(1):16-23).

[0251] Tauopathies usually come along with hyperphosphorylated tau as intracellular neurofibrillary tangles. Thus, in one embodiment, it may be beneficial to use recombinant Fab (rFab) and scFvs of the anti-tau antibody, which might more readily penetrate a cell membrane. For example, Krishnaswamy et al., J Neurosci. 34 (2014), 16835-16850 describe the use of smaller antibody fragments that bind to tau as being attractive as ligands for in vivo imaging and showed that peripheral injection of scFvs resulted in a strong in vivo brain signal in transgenic tauopathy mice, but not in wild-type or amyloid-β plaque mice. Furthermore, Nisbet et al. Brain 140 (2017), 1220-1230 demonstrated that intravenous administration of anti-tau scFvs to transgenic mice reduced anxiety-like behavior and tau hyperphosphorylation.

[0252] Intrabodies (iAbs) are recombinant antibodies engineered to be intracellularly expressed and also provide a therapeutic tool for targeting intracellular proteins (Southwell, et al. 2009, The Journal of Neuroscience, 29(43):13589-13602; Khoshnan, et al. 2002, Proc Natl Acad Sci USA 99:1002-1007). IAbs may also target proteins to particular cellular compartments using localization sequences (Marschall and Dubel, 2016, Comput Struct Biotechnol J. 14:304-308; Lecerf J M, et al. 2001, Proc Natl Acad Sci USA 98:4764-4769).

[0253] Immunotherapy approaches using different antibody formats such as scFv, single-domain antibody fragments (VHHs or sdAbs), bispecific antibodies, intrabodies and nanobodies have shown therapeutic efficacy in several animal models of Alzheimer's disease (AD), Parkinson disease (PD), dementia with Lewy bodies (DLB), frontotemporal dementia (FTD), Huntington disease (HD), transmissible spongiform encephalopathies (TSEs) and multiple sclerosis (MS). It has been demonstrated that recombinant antibody fragments may neutralize toxic extra- and intracellular misfolded proteins involved in the pathogenesis neurodegenerative diseases and thus represent a promising tool for the development of antibody-based immunotherapeutics for those diseases; see review of Manoutcharian et al., Curr Neuropharmacol 15 (2017), 779-788.

[0254] The perceived advantages of using small Fab and scFv engineered antibody formats which lack the effector function include more efficient cell membrane penetration and minimizing the risk of triggering inflammatory side reactions. Furthermore, besides scFv and single-domain antibodies retain the binding specificity of full-length antibodies, they can be expressed as single genes and intracellularly in mammalian cells as intrabodies, with the potential for alteration of the folding, interactions, modifications, or subcellular localization of their targets; see for review, e.g., Miller and Messer, Molecular Therapy 12 (2005), 394-401.

### 5.5. Transgene Post-Translational Modifications

[0255] Another aspect of the present invention relates to Tau-specific antibodies having human cell-specific post-translational modifications, whereas the presence of an post-translational modifications of the expressed protein may alter several properties of the therapeutic protein, including increase expressionist pharmacokinetics in vivo. The amino acid sequence (primary sequence) of Tau-specific mAbs disclosed herein each may comprise at least one site at which N-glycosylation or tyrosine sulfation takes place for glycosylation and/or sulfation positions within the amino acid sequences of the variable regions as well as constant regions of the therapeutic antibodies. Post-translational modification is known to occur in the Fc domain of full-length antibodies, particularly at residue N297 (by EU numbering).

[0256] Alternatively, mutations may be introduced into the Fc domain to alter the glycosylation site at residue N297 (EU numbering), in particular substituting another amino acid for the asparagine at 297 or the threonine at 299 to remove the glycosylation site resulting in an aglycosylated Fc domain.

### 5.5.1. N-Glycosylation

### Reverse Glycosylation Sites

[0257] The canonical N-glycosylation sequence is known in the art to be Asn-X-Ser(or Thr), wherein X can be any amino acid except Pro. However, it recently has been demonstrated that asparagine (Asn) residues of human antibodies can be glycosylated in the context of a reverse consensus motif, Ser(or Thr)-X-Asn, wherein X can be any amino acid except Pro. See Valliere-Douglass et al., 2009, J. Biol. Chem. 284:32493-32506; and Valliere-Douglass et al., 2010, J. Biol. Chem. 285:16012-16022. As disclosed herein, certain Tau-specific mAbs disclosed herein comprise such reverse consensus sequences.

### Non-Consensus Glycosylation Sites

[0258] In addition to reverse N-glycosylation sites, it recently has been demonstrated that glutamine (Gln) residues of human antibodies can be glycosylated in the context of a non-consensus motif, Gln-Gly-Thr. See Valliere-Douglass et al., 2010, J. Biol. Chem. 285:16012-16022. Certain Tau-specific mAbs disclosed herein may comprise such non-consensus sequences. In addition, O-glycosylation comprises the addition of N-acetyl-galactosamine to serine or threonine residues by the enzyme. It has been demonstrated that amino acid residues present in the hinge region of antibodies can be O-glycosylated. The possibility of O-glycosylation confers another advantage to the therapeutic antibodies provided herein, as compared to, e.g., antigen-binding fragments produced in E. coli, again because the E. coli naturally does not contain machinery equivalent to that used in human O-glycosylation. (Instead, O-glycosylation in E. coli has been demonstrated only when the bacteria is modified to contain specific O-glycosylation machinery. See, e.g., Farid-Moayer et al., 2007, J. Bacteriol. 189:8088-8098.)

### Engineered N-Glycosylation Sites

[0259] In certain embodiments, a nucleic acid encoding a Tau-specific mAb is modified to include 1, 2, 3, 4, 5, 6, 7, 8, 9, 10, or more N-glycosylation sites (including the canonical N-glycosylation consensus sequence, reverse N-glycosylation site, and non-consensus N-glycosylation sites) than would normally be associated with the Tau-specific mAb (e.g., relative to the number of N-glycosylation sites associated with the Tau-specific mAb in its unmodified state). In certain embodiments, introduction of glycosylation sites is accomplished by insertion of N-glycosylation sites (including the canonical N-glycosylation consensus sequence, reverse N-glycosylation site, and non-consensus N-glycosylation sites) anywhere in the primary structure of the antigen-binding fragment, so long as said introduction does not impact binding of the antibody or antigen-binding fragment to its antigen. Introduction of glycosylation sites can be accomplished by, e.g., adding new amino acids to the primary structure of the antigen-binding fragment, or the antibody from which the antigen-binding fragment is derived (e.g., the glycosylation sites are added, in full or in part), or by mutating existing amino acids in the antigen-binding fragment, or the antibody from which the antigen-binding fragment is derived, in order to generate the N-glycosylation sites (e.g., amino acids are not added to the antigen-binding fragment/antibody, but selected amino acids of the antigen-binding fragment/antibody are mutated so as to form N-glycosylation sites). Those of skill in the art will recognize that the amino acid sequence of a protein can be readily modified using approaches known in the art, e.g., recombinant approaches that include modification of the nucleic acid sequence encoding the protein.

[0260] In a specific embodiment, a Tau-specific mAb or antigen-binding fragment is modified such that, when expressed in mammalian cells, such as CNS cells, it can be hyperglycosylated. See Courtois et al., 2016, mAbs 8:99-112 which is incorporated by reference herein in its entirety.

### 5.5.2 N-Glycosylation of Fully Human Post-Translationally Modified mAbs and Antigen-Binding Fragments

[0261] Unlike small molecule drugs, biologics usually comprise a mixture of many variants with different modifications or forms that could have a different potency, pharmacokinetics, and/or safety profile. It is not essential that every molecule produced either in the gene therapy or protein therapy approach be fully glycosylated and sulfated. Rather, the population of glycoproteins produced should have sufficient glycosylation (including 2,6-sialylation) and sulfation to demonstrate efficacy. The goal of gene therapy treatment provided herein can be, for example, to slow or arrest the progression of a disease or abnormal condition or to reduce the severity of one or more symptoms associated with the disease or abnormal condition.

[0262] When Tau-specific mAb is expressed in a human cell, the N-glycosylation sites of the antigen-binding fragment can be glycosylated with various different glycans. N-glycans of antigen-binding fragments and the Fc domain have been characterized in the art. For example, Bondt et al., 2014, Mol. & Cell. Proteomics 13.11:3029-3039 (incorporated by reference herein in its entirety for its disclosure of Fab-associated N-glycans) characterizes glycans associated with Fabs, and demonstrates that Fab and Fc portions of antibodies comprise distinct glycosylation patterns, with Fab glycans being high in galactosylation, sialylation, and bisection (e.g., with bisecting GlcNAc) but low in fucosylation with respect to Fc glycans. Like Bondt, Huang et al., 2006, Anal. Biochem. 349:197-207 (incorporated by reference herein in its entirety for its disclosure of Fab-associated N-glycans) found that most glycans of Fabs are sialylated. However, in the Fab of the antibody examined by Huang (which was produced in a murine cell background), the identified sialic residues were N-Glycolylneuraminic acid (“Neu5Gc” or “NeuGc”) (which is not natural to humans) instead of N-acetylneuraminic acid (“Neu5Ac,” the predominant human sialic acid). In addition, Song et al., 2014, Anal. Chem. 86:5661-5666 (incorporated by reference herein in its entirety for its disclosure of Fab-associated N-glycans) describes a library of N-glycans associated with commercially available antibodies.

[0263] Glycosylation of the Fc domain has been characterized and is a single N-linked glycan at asparagine 297 (EU numbering). The glycan plays an integral structural and functional role, impacting antibody effector function, such as binding to Fc receptor (see, for example, Jennewein and Alter, 2017, Trends In Immunology 38:358 for a discussion of the role of Fc glycosylation in antibody function). Removal of the Fc region glycan almost completely ablates effector function (Jennewien and Alter at 362). The composition of the Fc glycan has been shown to impact effector function, for example hypergalactosylation and reduction in fucosylation have been shown to increase ADCC activity while sialylation correlates with anti-inflammatory effects (Id. at 364). Disease states, genetics and even diet can impact the composition of the Fc glycan in vivo. For recombinantly expressed antibodies, the glycan composition can differ significantly by the type of host cell used for recombinant expression and strategies are available to control and modify the composition of the glycan in therapeutic antibodies recombinantly expressed in cell culture, such as CHO, to alter effector function (see, for example, US 2014/0193404 by Hansen et al.). Accordingly, the Tau-specific mAbs provided herein may advantageously have a glycan at N297 that is more like the native, human glycan composition than antibodies expressed in non-human host cells.

[0264] Importantly, when the Tau-specific mAbs are expressed in human cells, the need for in vitro production in prokaryotic host cells (e.g., E. coli) or eukaryotic host cells (e.g., CHO cells or NSO cells) is circumvented. Instead, as a result of the methods described herein, N-glycosylation sites of the Tau-specific mAbs are advantageously decorated with glycans relevant to and beneficial to treatment of humans. Such an advantage is unattainable when CHO cells, NSO cells, or E. coli are utilized in antibody/antigen-binding fragment production, because e.g., CHO cells (1) do not express 2,6 sialyltransferase and thus cannot add 2,6 sialic acid during N-glycosylation; (2) can add Neu5Gc as sialic acid instead of Neu5Ac; and (3) can also produce an immunogenic glycan, the α-Gal antigen, which reacts with anti-α-Gal antibodies present in most individuals, which at high concentrations can trigger anaphylaxis; and because (4) E. coli does not naturally contain components needed for N-glycosylation.

[0265] Assays for determining the glycosylation pattern of antibodies, including antigen-binding fragments are known in the art. For example, hydrazinolysis can be used to analyze glycans. First, polysaccharides are released from their associated protein by incubation with hydrazine (the Ludger Liberate Hydrazinolysis Glycan Release Kit, Oxfordshire, UK can be used). The nucleophile hydrazine attacks the glycosidic bond between the polysaccharide and the carrier protein and allows release of the attached glycans. N-acetyl groups are lost during this treatment and have to be reconstituted by re-N-acetylation. Glycans may also be released using enzymes such as glycosidases or endoglycosidases, such as PNGase F and Endo H, which cleave cleanly and with fewer side reactions than hydrazines. The free glycans can be purified on carbon columns and subsequently labeled at the reducing end with the fluorophor 2-amino benzamide. The labeled polysaccharides can be separated on a GlycoSep-N column (GL Sciences) according to the HPLC protocol of Royle et al, Anal Biochem 2002, 304(1):70-90. The resulting fluorescence chromatogram indicates the polysaccharide length and number of repeating units. Structural information can be gathered by collecting individual peaks and subsequently performing MS/MS analysis. Thereby the monosaccharide composition and sequence of the repeating unit can be confirmed and additionally in homogeneity of the polysaccharide composition can be identified. Specific peaks of low or high molecular weight can be analyzed by MALDI-MS/MS and the result used to confirm the glycan sequence. Each peak in the chromatogram corresponds to a polymer, e.g., glycan, consisting of a certain number of repeat units and fragments, e.g., sugar residues, thereof. The chromatogram thus allows measurement of the polymer, e.g., glycan, length distribution. The elution time is an indication for polymer length, while fluorescence intensity correlates with molar abundance for the respective polymer, e.g., glycan. Other methods for assessing glycans associated with antigen-binding fragments include those described by Bondt et al., 2014, Mol. & Cell. Proteomics 13.11:3029-3039, Huang et al., 2006, Anal. Biochem. 349:197-207, and/or Song et al., 2014, Anal. Chem. 86:5661-5666.

[0266] Homogeneity or heterogeneity of the glycan patterns associated with antibodies (including antigen-binding fragments), as it relates to both glycan length or size and numbers glycans present across glycosylation sites, can be assessed using methods known in the art, e.g., methods that measure glycan length or size and hydrodynamic radius. HPLC, such as size exclusion, normal phase, reversed phase, and anion exchange HPLC, as well as capillary electrophoresis, allows the measurement of the hydrodynamic radius. Higher numbers of glycosylation sites in a protein lead to higher variation in hydrodynamic radius compared to a carrier with less glycosylation sites. However, when single glycan chains are analyzed, they may be more homogenous due to the more controlled length. Glycan length can be measured by hydrazinolysis, SDS PAGE, and capillary gel electrophoresis. In addition, homogeneity can also mean that certain glycosylation site usage patterns change to a broader/narrower range. These factors can be measured by Glycopeptide LC-MS/MS.

[0267] In certain embodiments, the human post-translationally modified mAbs, or antigen binding fragments thereof, also do not contain detectable NeuGc and/or α-Gal. By “detectable NeuGc” or “detectable α-Gal” or “does not contain or does not have NeuGc or α-Gal” means herein that the human post-translationally modified mAb or antigen-binding fragment, does not contain NeuGc or α-Gal moieties detectable by standard assay methods known in the art. For example, NeuGc may be detected by HPLC according to Hara et al., 1989, “Highly Sensitive Determination of N-Acetyl-and N-Glycolylneuraminic Acids in Human Serum and Urine and Rat Serum by Reversed-Phase Liquid Chromatography with Fluorescence Detection.” J. Chromatogr., B: Biomed. 377, 111-119, which is hereby incorporated by reference for the method of detecting NeuGc. Alternatively, NeuGc may be detected by mass spectrometry. The α-Gal may be detected using an ELISA, see, for example, Galili et al., 1998, “A sensitive assay for measuring α-Gal epitope expression on cells by a monoclonal anti-Gal antibody.” Transplantation. 65(8):1129-32, or by mass spectrometry, see, for example, Ayoub et al., 2013, “Correct primary structure assessment and extensive glyco-profiling of cetuximab by a combination of intact, middle-up, middle-down and bottom-up ESI and MALDI mass spectrometry techniques.” Landes Bioscience. 5(5):699-710. See also the references cited in Platts-Mills et al., 2015, “Anaphylaxis to the Carbohydrate Side-Chain Alpha-gal” Immunol Allergy Clin North Am. 35(2): 247-260.

### Benefits of N-Glycosylation

[0268] N-glycosylation confers numerous benefits on the Tau-specific mAbs described herein. Such benefits are unattainable by production of antigen-binding fragments in E. coli, because E. coli does not naturally possess components needed for N-glycosylation. Further, some benefits are unattainable through antibody production in, e.g., CHO cells (or murine cells such as NSO cells), because CHO cells lack components needed for addition of certain glycans (e.g., 2,6 sialic acid and bisecting GlcNAc) and because either CHO or murine cell lines add N-N-Glycolylneuraminic acid (“Neu5Gc” or “NeuGc”) which is not natural to humans (and potentially immunogenic), instead of N-Acetylneuraminic acid (“Neu5Ac”) the predominant human sialic acid. See, e.g., Dumont et al., 2015, Crit. Rev. Biotechnol. 36(6):1110-1122; Huang et al., 2006, Anal. Biochem. 349:197-207 (NeuGc is the predominant sialic acid in murine cell lines such as SP2/0 and NSO); and Song et al., 2014, Anal. Chem. 86:5661-5666, each of which is incorporated by reference herein in its entirety). Moreover, CHO cells can also produce an immunogenic glycan, the α-Gal antigen, which reacts with anti-α-Gal antibodies present in most individuals, which at high concentrations can trigger anaphylaxis. See, e.g., Bosques, 2010, Nat. Biotech. 28:1153-1156. The human glycosylation pattern of the Tau-specific mAbs described herein should reduce immunogenicity of the transgene product and improve efficacy.

[0269] While non-canonical glycosylation sites usually result in low level glycosylation (e.g., 1-5%) of the antibody population, the functional benefits may be significant (See, e.g., van de Bovenkamp et al., 2016, J. Immunol. 196:1435-1441). For example, Fab glycosylation may affect the stability, half-life, and binding characteristics of an antibody. To determine the effects of Fab glycosylation on the affinity of the antibody for its target, any technique known to one of skill in the art may be used, for example, enzyme linked immunosorbent assay (ELISA), or surface plasmon resonance (SPR). To determine the effects of Fab glycosylation on the half-life of the antibody, any technique known to one of skill in the art may be used, for example, by measurement of the levels of radioactivity in the blood or organs in a subject to whom a radiolabeled antibody has been administered. To determine the effects of Fab glycosylation on the stability, for example, levels of aggregation or protein unfolding, of the antibody, any technique known to one of skill in the art may be used, for example, differential scanning calorimetry (DSC), high performance liquid chromatography (HPLC), e.g., size exclusion high performance liquid chromatography (SEC-HPLC), capillary electrophoresis, mass spectrometry, or turbidity measurement.

[0270] The presence of sialic acid on Tau-specific mAbs used in the methods described herein can impact clearance rate of Tau-specific mAbs. Accordingly, sialic acid patterns of a Tau-specific mAb can be used to generate a therapeutic having an optimized clearance rate. Methods of assessing antigen-binding fragment clearance rate are known in the art. See, e.g., Huang et al., 2006, Anal. Biochem. 349:197-207.

[0271] In another specific embodiment, a benefit conferred by N-glycosylation is reduced aggregation. Occupied N-glycosylation sites can mask aggregation prone amino acid residues, resulting in decreased aggregation. Such N-glycosylation sites can be native to an antigen-binding fragment used herein or engineered into an antigen-binding fragment used herein, resulting in Tau-specific mAb that is less prone to aggregation when expressed, e.g., expressed in human cells. Methods of assessing aggregation of antibodies are known in the art. See, e.g., Courtois et al., 2016, mAbs 8:99-112 which is incorporated by reference herein in its entirety.

[0272] In another specific embodiment, a benefit conferred by N-glycosylation is reduced immunogenicity. Such N-glycosylation sites can be native to an antigen-binding fragment used herein or engineered into an antigen-binding fragment used herein, resulting in Tau-specific mAb that is less prone to immunogenicity when expressed, e.g., expressed in human retinal cells, human CNS cells, human liver cells or human muscle cells.

[0273] In another specific embodiment, a benefit conferred by N-glycosylation is protein stability. N-glycosylation of proteins is well-known to confer stability on them, and methods of assessing protein stability resulting from N-glycosylation are known in the art. See, e.g., Sola and Griebenow, 2009, J Pharm Sci., 98(4): 1223-1245.

[0274] In another specific embodiment, a benefit conferred by N-glycosylation is altered binding affinity. It is known in the art that the presence of N-glycosylation sites in the variable domains of an antibody can increase the affinity of the antibody for its antigen. See, e.g., Bovenkamp et al., 2016, J. Immunol. 196:1435-1441. Assays for measuring antibody binding affinity are known in the art. See, e.g., Wright et al., 1991, EMBO J. 10:2717-2723; and Leibiger et al., 1999, Biochem. J. 338:529-538.

### 5.5.3 Tyrosine Sulfation

[0275] Tyrosine sulfation occurs at tyrosine (Y) residues with glutamate (E) or aspartate (D) within +5 to −5 position of Y, and where position −1 of Y is a neutral or acidic charged amino acid, but not a basic amino acid, e.g., arginine (R), lysine (K), or histidine (H) that abolishes sulfation. Surprisingly, the Tau-specific mAbs described herein may comprise tyrosine sulfation sites.

[0276] Importantly, tyrosine-sulfated antigen-binding fragments cannot be produced in E. coli, which naturally does not possess the enzymes required for tyrosine-sulfation. Further, CHO cells are deficient for tyrosine sulfation-they are not secretory cells and have a limited capacity for post-translational tyrosine-sulfation. See, e.g., Mikkelsen & Ezban, 1991, Biochemistry 30: 1533-1537. Advantageously, the methods provided herein call for expression of Tau-specific mAbs in human cells that are secretory and have capacity for tyrosine sulfation.

[0277] Tyrosine sulfation is advantageous for several reasons. For example, tyrosine-sulfation of the antigen-binding fragment of therapeutic antibodies against targets has been shown to dramatically increase avidity for antigen and activity. See, e.g., Loos et al., 2015, PNAS 112: 12675-12680, and Choe et al., 2003, Cell 114: 161-170. Assays for detection tyrosine sulfation are known in the art. See, e.g., Yang et al., 2015, Molecules 20:2138-2164.

### 5.5.4 O-Glycosylation

[0278] O-glycosylation comprises the addition of N-acetyl-galactosamine to serine or threonine residues by the enzyme. It has been demonstrated that amino acid residues present in the hinge region of antibodies can be O-glycosylated. In certain embodiments, the Tau-specific mAbs comprise all or a portion of their hinge region, and thus are capable of being O-glycosylated when expressed in human cells. The possibility of O-glycosylation confers another advantage to the Tau-specific mAbs provided herein, as compared to, e.g., antigen-binding fragments produced in E. coli, again because the E. coli naturally does not contain machinery equivalent to that used in human O-glycosylation. (Instead, O-glycosylation in E. coli has been demonstrated only when the bacteria is modified to contain specific O-glycosylation machinery. See, e.g., Farid-Moayer et al., 2007, J Bacteriol. 189:8088-8098.) O-glycosylated HuGlyFab, by virtue of possessing glycans, shares advantageous characteristics with N-glycosylated Tau-specific mAbs (as discussed above).

[0279] Other modifications may be employed to alter the transgene sequence and subsequently the expressed protein and its ability to be glycosylated or sulfated, and the like, and are well known to the skilled person.

### 5.5.5. Human Post Translationally Modified Antibodies

[0280] The production of the anti-Tau human post-translationally modified mAb or human post-translationally modified Fab, should result in a “biobetter” molecule for the treatment accomplished via gene therapy—e.g., by administering a viral vector or other DNA expression construct encoding the anti-Tau human post-translationally modified Fab or human post-translationally modified mAb, intrathecally, particularly intracisternal or lumbar administration, or intravenous administration to human subjects (patients) diagnosed with or having one or more symptoms of AD, PSP, and/or PiD, to create a permanent depot in the CNS that continuously supplies the fully-human post-translationally modified, e.g., human-glycosylated, sulfated transgene product produced by transduced CNS cells.

[0281] The cDNA construct for the anti-Tau human post-translationally modified mAb or anti-Tau human post-translationally modified Fab should include a signal peptide that ensures proper co- and post-translational processing (glycosylation and protein sulfation) by the transduced CNS cells. For example, the signal sequence may be MYRMQLLLLIALSLALVTNS (SEQ ID NO: 87).

[0282] As an alternative, or an additional treatment to gene therapy, the anti-Tau human post-translationally modified mAb or human post-translationally modified Fab can be produced in human cell lines by recombinant DNA technology, and administered to patients diagnosed with Alzheimer's disease, amyotrophic lateral sclerosis/parkinsonism-dementia complex, argyrophilic grain dementia, British type amyloid angiopathy, cerebral amyloid angiopathy, corticobasal degeneration, Creutzfeldt-Jakob disease, dementia pugilistica, diffuse neurofibrillary tangles with calcification, Down's syndrome, frontotemporal dementia, frontotemporal dementia with parkinsonism linked to chromosome 17, frontotemporal lobar degeneration, Gerstmann-Straussler-Scheinker disease, Hallervorden-Spatz disease, inclusion body myositis, multiple system atrophy, myotonic dystrophy, Niemann-Pick disease type C, non-Guamanian motor neuron disease with neurofibrillary tangles, Pick's disease, postencephalitic parkinsonism, prion protein cerebral amyloid angiopathy, progressive subcortical gliosis, progressive supranuclear palsy, subacute sclerosing panencephalitis, Tangle only dementia, multi-infarct dementia and ischemic stroke, or for whom therapy for Alzheimer's disease, amyotrophic lateral sclerosis/parkinsonism-dementia complex, argyrophilic grain dementia, British type amyloid angiopathy, cerebral amyloid angiopathy, corticobasal degeneration, Creutzfeldt-Jakob disease, dementia pugilistica, diffuse neurofibrillary tangles with calcification, Down's syndrome, frontotemporal dementia, frontotemporal dementia with parkinsonism linked to chromosome 17, frontotemporal lobar degeneration, Gerstmann-Straussler-Scheinker disease, Hallervorden-Spatz disease, inclusion body myositis, multiple system atrophy, myotonic dystrophy, Niemann-Pick disease type C, non-Guamanian motor neuron disease with neurofibrillary tangles, Pick's disease, postencephalitic parkinsonism, prion protein cerebral amyloid angiopathy, progressive subcortical gliosis, progressive supranuclear palsy, subacute sclerosing panencephalitis, Tangle only dementia, multi-infarct dementia and ischemic stroke is considered appropriate.

[0283] In some embodiments, the anti-Tau human post-translationally modified mAb or antigen-binding fragment thereof has heavy and light chains with the amino acid sequences of the heavy and light chain Fab portions of NI-502.4P3 as set forth in FIG. 1D (with non-consensus asparagine (N) glycosylation sites highlighted in grey, glutamine (Q) glycosylation sites highlighted in bold, and Y-sulfation sites highlighted in grey and italic) has glycosylation, particularly a 2,6-sialylation, at one or more of the amino acid positions Q114 and/or N164 of the heavy chain (SEQ ID NO: 187) or N22, N35, N164 and/or N216 of the light chain (SEQ ID NO: 188). Alternatively or in addition to, the human post-translationally modified mAb or antigen binding-fragment thereof with the heavy and light chain variable domain sequences of NI-502.4P3 has a sulfation group at Y94 and/or Y95 of the heavy chain (SEQ ID NO: 187) and/or Y198 of the light chain (SEQ ID NO: 188).

[0284] In some embodiments, the anti-Tau human post-translationally modified mAb or antigen-binding fragment thereof has heavy and light chains with the amino acid sequences of the heavy and light chain Fab portions of NI-502.31B6 as set forth in FIG. 1E (with non-consensus asparagine (N) glycosylation sites highlighted in grey, glutamine (Q) glycosylation sites highlighted in bold, and Y-sulfation sites highlighted in grey and italic) has glycosylation, particularly a 2,6-sialylation, at one or more of the amino acid positions N54, Q118 and/or N168 of the heavy chain (SEQ ID NO: 189) or N174 of the light chain (SEQ ID NO: 190). Alternatively or in addition to, the human post-translationally modified mAb or antigen binding-fragment thereof with the heavy and light chain variable domain sequences of NI-502.31B6 has a sulfation group at Y94 and/or Y95 of the heavy chain (SEQ ID NO: 189) and/or Y88 and/or Y89 of the light chain (SEQ ID NO: 190).

[0285] In some embodiments, the anti-Tau human post-translationally modified mAb or antigen-binding fragment thereof has heavy and light chains with the amino acid sequences of the heavy and light chain Fab portions of NI-502.8H1 as set forth in FIG. 1F (with non-consensus asparagine (N) glycosylation sites highlighted in grey, glutamine (Q) glycosylation sites highlighted in bold, and Y-sulfation sites highlighted in grey and italic) has glycosylation, particularly a 2,6-sialylation, at one or more of the amino acid positions Q114 and/or N164 of the heavy chain (SEQ ID NO: 191) or N160 and/or N212 of the light chain (SEQ ID NO: 192). Alternatively or in addition to, the HuPTM mAb or antigen binding-fragment thereof with the heavy and light chain variable domain sequences of NI-502.8H1 has a sulfation group at Y94 and/or Y95 of the heavy chain (SEQ ID NO: 191) and/or Y87 and/or Y88 and/or Y194 of the light chain (SEQ ID NO: 192).

[0286] In other embodiments, the anti-Tau human post-translationally modified mAb or antigen-binding fragment thereof does not contain any detectable (e.g., as detected by assays known in the art, for example, those described in section 5.5.2, infra) NeuGc moieties and/or does not contain any detectable (e.g., as detected by assays known in the art, for example, those described in section 5.5.2, infra) alpha-Gal moieties. In certain embodiments, the human post-translationally modified mAb is a full length or substantially full length mAb with an Fc region.

[0287] In certain embodiments, the human post-translationally modified mAb or Fab is therapeutically effective and is at least 0.5%, 1% or 2% 2,6 sialylated and/or sulfated and may be at least 5%, 10% or even 50% or 100% glycosylated 2,6 sialylation and/or sulfated. The goal of gene therapy treatment provided herein is to slow or arrest the progression of Alzheimer's disease, amyotrophic lateral sclerosis/parkinsonism-dementia complex, argyrophilic grain dementia, British type amyloid angiopathy, cerebral amyloid angiopathy, corticobasal degeneration, Creutzfeldt-Jakob disease, dementia pugilistica, diffuse neurofibrillary tangles with calcification, Down's syndrome, frontotemporal dementia, frontotemporal dementia with parkinsonism linked to chromosome 17, frontotemporal lobar degeneration, Gerstmann-Straussler-Scheinker disease, Hallervorden-Spatz disease, inclusion body myositis, multiple system atrophy, myotonic dystrophy, Niemann-Pick disease type C, non-Guamanian motor neuron disease with neurofibrillary tangles, Pick's disease, postencephalitic parkinsonism, prion protein cerebral amyloid angiopathy, progressive subcortical gliosis, progressive supranuclear palsy, subacute sclerosing panencephalitis, Tangle only dementia, multi-infarct dementia and ischemic stroke, particularly cognitive impairment, gross or fine motor skill impairment, or vision impairment. Efficacy may be monitored by measuring a reduction in plaque formation and/or an improvement in cognitive function, with motor skills, or with vision or a reduction in the decline in cognitive function, motor skills, or vision.

### 5.6. Vector Formats

### 5.6.1. ssAAV

[0288] In one embodiment, an expression cassette for use in an AAV vector is provided. In certain embodiments, a single-stranded AAV (ssAAV) may be used. The AAV genome is packaged as a linear ssDNA molecule with the palindromic inverted terminal repeat (ITR) sequences which form dsDNA hairpin structures at each end. These serve as replication origins during productive infection and as priming sites for host-cell DNA polymerase to begin synthesis of a complementary strand.

[0289] In that embodiment, the AAV expression cassette includes at least one AAV inverted terminal repeat (ITR) sequence. In another embodiment, the expression cassette comprises 5′ ITR sequences and 3′ ITR sequences. In one embodiment, the 5′ and 3′ ITRs flank the codon optimized nucleic acid sequence that encodes the transgene. Thus, as described herein, an AAV expression cassette is meant to describe an expression cassette as described above flanked on its 5′ end by a 5′AAV inverted terminal repeat sequence (ITR) and on its 3′ end by a 3′ AAV ITR. Thus, this rAAV genome contains the minimal sequences required to package the expression cassette into an AAV viral particle, i.e., the AAV 5′ and 3′ ITRs. The AAV ITRs may be obtained from the ITR sequences of any AAV, such as described herein. These ITRs may be of the same AAV origin as the capsid employed in the resulting recombinant AAV, or of a different AAV origin (to produce an AAV pseudotype). In one embodiment, the ITR sequences from AAV2, or the deleted version thereof (ΔITR), are used for convenience and to accelerate regulatory approval. However, ITRs from other AAV sources may be selected. Where the source of the ITRs is from AAV2 and the AAV capsid is from another AAV source, the resulting vector may be termed pseudotyped. Typically, the AAV vector genome comprises an AAV 5′ ITR, the TPP1 coding sequences and any regulatory sequences, and an AAV 3′ ITR. However, other configurations of these elements may be suitable. A shortened version of the 5′ ITR, termed ΔITR, has been described in which the D-sequence and terminal resolution site (trs) are deleted. In other embodiments, the full-length AAV 5′ and 3′ ITRs are used. Each rAAV genome can be then introduced into a production plasmid.

### 5.6.2. ScAAV

[0290] In certain embodiments, a self-complementary vector, e.g., scAAV, may be used (see, e.g., Wu, 2007, Human Gene Therapy, 18(2):171-82, McCarty et al, 2001, Gene Therapy, Vol 8, Number 16, Pages 1248-1254; and U.S. Pat. Nos. 6,596,535; 7,125,717; and 7,456,683, each of which is incorporated herein by reference in its entirety). “Self-complementary AAV” refers a plasmid or vector having an expression cassette in which a coding region carried by a recombinant AAV nucleic acid sequence has been designed to form an intra-molecular double-stranded DNA template. Unlike ssDNA genomes, the scAAV genome is not subject to host-cell DNA polymerase and does not require synthesis of a complementary strand. Upon infection, rather than waiting for cell mediated synthesis of the second strand, the two complementary halves of scAAV will associate to form one double stranded DNA (dsDNA) unit that is ready for immediate replication and transcription. See, e.g., D M McCarty et al, “Self-complementary recombinant adeno-associated virus (scAAV) vectors promote efficient transduction independently of DNA synthesis”, Gene Therapy, (August 2001), Vol 8, Number 16, Pages 1248-1254. Self-complementary AAVs are described in, e.g., U.S. Pat. Nos. 6,596,535; 7,125,717; and 7,456,683, each of which is incorporated herein by reference in its entirety.

### 5.7. Vectors for Gene Delivery

[0291] Viral vectors or other DNA expression constructs encoding a human Tau-specific mAb or antigen-binding fragment thereof, particularly a human glycosylated mAb or a hyperglycosylated derivative of a human Tau-specific mAb antigen-binding fragment are provided herein. The viral vectors and other DNA expression constructs provided herein include any suitable method for delivery of a transgene to a target cell. The means of delivery of a transgene include viral vectors, liposomes, other lipid-containing complexes, other macromolecular complexes, synthetic modified mRNA, unmodified mRNA, small molecules, non-biologically active molecules (e.g., gold particles), polymerized molecules (e.g., dendrimers), naked DNA, plasmids, phages, transposons, cosmids, or episomes. In some embodiments, the vector is a targeted vector, e.g., a vector targeted to CNS cells, or liver cells.

### 5.7.1. Viral Vectors

[0292] Viral vectors include adenovirus, adeno-associated virus (AAV, e.g., AAV8, AAV9, AAVrh10, AAV.PHP, AAV.PHP.eB), lentivirus, helper-dependent adenovirus, herpes simplex virus, poxvirus, hemagglutinin virus of Japan (HVJ), alphavirus, vaccinia virus, and retrovirus vectors. Retroviral vectors include murine leukemia virus (MLV) and human immunodeficiency virus (HIV)-based vectors. Alphavirus vectors include semliki forest virus (SFV) and sindbis virus (SIN). In certain embodiments, the viral vectors provided herein are recombinant viral vectors. In certain embodiments, the viral vectors provided herein are altered such that they are replication-deficient in humans. In certain embodiments, the viral vectors are hybrid vectors, e.g., an AAV vector placed into a “helpless” adenoviral vector. In certain embodiments, provided herein are viral vectors comprising a viral capsid from a first virus and viral envelope proteins from a second virus. In other embodiments, the second virus is vesicular stomatitus virus (VSV). In still other embodiments, the envelope protein is VSV-G protein.

[0293] In certain embodiments, the viral vectors used in the methods described herein are adenovirus based viral vectors. A recombinant adenovirus vector may be used to transfer in the transgene encoding the Tau-specific mAb or antigen-binding fragment thereof. The recombinant adenovirus can be a first-generation vector, with an E1 deletion, with or without an E3 deletion, and with the expression cassette inserted into either deleted region. The recombinant adenovirus can be a second-generation vector, which contains full or partial deletions of the E2 and E4 regions. A helper-dependent adenovirus retains only the adenovirus inverted terminal repeats and the packaging signal (phi). The transgene is inserted between the packaging signal and the 3′ITR, with or without stuffer sequences to keep the genome close to wild-type size of approximately 36 kb. An exemplary protocol for production of adenoviral vectors may be found in Alba et al., 2005, “Gutless adenovirus: last generation adenovirus for gene therapy,” Gene Therapy 12:S18-S27, which is incorporated by reference herein in its entirety.

[0294] In certain embodiments, the viral vectors used in the methods described herein are lentivirus based viral vectors. A recombinant lentivirus vector may be used to transfer in the transgene encoding the Tau-specific mAb antigen binding fragment. Four plasmids are used to make the construct: Gag/pol sequence containing plasmid, Rev sequence containing plasmids, Envelope protein containing plasmid (e.g., VSV-G), and Cis plasmid with the packaging elements and the anti-Tau antigen-binding fragment gene.

[0295] For lentiviral vector production, the four plasmids are co-transfected into cells (e.g., HEK293 based cells), whereby polyethylenimine or calcium phosphate can be used as transfection agents, among others. The lentivirus is then harvested in the supernatant (lentiviruses need to bud from the cells to be active, so no cell harvest needs/should be done). The supernatant is filtered (0.45 μm) and then magnesium chloride and benzonase added. Further downstream processes can vary widely, with using TFF and column chromatography being the most GMP compatible ones. Others use ultracentrifugation with/without column chromatography. Exemplary protocols for production of lentiviral vectors may be found in Lesch et al., 2011, “Production and purification of lentiviral vector generated in 293T suspension cells with baculoviral vectors,” Gene Therapy 18:531-538, and Ausubel et al., 2012, “Production of CGMP-Grade Lentiviral Vectors,” Bioprocess Int. 10(2):32-43, both of which are incorporated by reference herein in their entireties.

[0296] In a specific embodiment, a vector for use in the methods described herein is one that encodes a mAb or mAb antigen binding fragment, such that, upon introduction of the vector into a relevant cell, a glycosylated and/or tyrosine sulfated variant of the mAb or mAb antigen binding fragment is expressed by the cell.

[0297] Other viral vectors may be used, including but not limited to lentiviral vectors; vaccinia viral vectors, or non-viral expression vectors referred to as “naked DNA” constructs. Expression of the transgene can be controlled by constitutive or tissue-specific expression control elements.

### 5.7.2. Recombinant AAV

[0298] In certain embodiments, the viral vectors provided herein are AAV based viral vectors. In certain embodiments, the AAV-based vectors provided herein do not encode the AAV rep gene (required for replication) and/or the AAV cap gene (required for synthesis of the capsid proteins) (the rep and cap proteins may be provided by the packaging cells in trans). Multiple AAV serotypes have been identified. In certain embodiments, AAV-based vectors provided herein comprise components from one or more serotypes of AAV. In certain embodiments, AAV based vectors provided herein comprise capsid components from one or more of AAV1, AAV2, AAV3, AAV4, AAV5, AAV6, AAV7, AAV8, AAV9, AAV.PHP.B, AAV.PHPeB, AAV10, AAV11, AAV.rh74v1, AAV.rh74v2, AAV.hu37, AAVrh10, AAVrh20, or AAVrh39. In certain embodiments, AAV based vectors provided herein comprise components from one or more of AAV8, AAV9, AAV.PHP.B, AAV.PHPeB, or AAVrh10 serotypes. Provided are viral vectors in which the capsid protein is a variant of the, AAV9 capsid protein (SEQ ID NO: 132), AAV.PHP.B (SEQ ID NO: 220), AAV.PHP.eB (SEQ ID NO: 219), or AAVrh10 capsid protein (SEQ ID NO: 133), and the capsid protein is e.g., at least 95%, 96%, 97%, 98%, 99% or 99.9% identical to the amino acid sequence of the AAV9 capsid protein (SEQ ID NO: 132), AAV.PHP.B (SEQ ID NO: 220), AAV.PHP.eB (SEQ ID NO: 219), or AAVrh10 capsid protein (SEQ ID NO: 133), while retaining the biological function of the native capsid. In certain embodiments, the encoded AAV capsid has the sequence of a wild-type capsid with 1, 2, 3, 4, 5, 6, 7, 8, 9, 10, 11, 12, 13, 14, 15, 16, 17, 18, 19, 20, 21, 22, 23, 24, 25, 26, 27, 28, 29 or 30 amino acid substitutions and retaining the biological function of the wild-type capsid, for example AAV9, AAV.PHP.eB, AAV.PHP.B, or AAVrh10 capsid. FIG. 2 provides a comparative alignment of the amino acid sequences of the capsid proteins of different AAV serotypes with potential amino acids that may be substituted at certain positions in the aligned sequences based upon the comparison in the row labeled SUBS. Accordingly, in certain embodiments, the AAV vector comprises an AAV1, AAV2, AAV3, AAV4, AAV5, AAV6, AAV7, AAV8, AAV9, AAV.PHP.B, AAV.PHPeB, AAV10, AAV11, AAV.rh74v1, AAV.rh74v2, AAV.hu37,AAVrh10, AAVrh20, or AAVrh39capsid variant that has 1, 2, 3, 4, 5, 6, 7, 8, 9, 10, 11, 12, 13, 14, 15, 16, 17, 18, 19, 20, 21, 22, 23, 24, 25, 26, 27, 28, 29 or 30 amino acid substitutions that are not present at that position in the native AAV capsid sequence.

[0299] In certain embodiments, the AAV that is used in the compositions and methods described herein is Anc80 or Anc80L65, as described in Zinn et al., 2015, Cell Rep. 12(6): 1056-1068, which is incorporated by reference in its entirety. In certain embodiments, the AAV that is used in the methods described herein is AAV2.7m8 and/or comprises one of the following amino acid insertions: LGETTRP (or LALGETTRP), as described in U.S. Pat. Nos. 9,193,956; 9,458,517; and 9,587,282 and US patent application publication no. 2016/0376323, and International Publication WO 2018/075798, each of which is incorporated herein by reference in its entirety. In certain embodiments, the AAV that is used in the methods described herein is any AAV disclosed in U.S. Pat. No. 9,585,971, such as AAV-PHP.B (see Table 10 below). In certain embodiments, the AAV that is used in the methods described herein is any AAV disclosed in the International Patent Application Nos. PCT/US2019/032387 and PCT/US2019/055756, such as VOY101 (SEQ ID NO: 221), VOY201 (SEQ ID NO: 222), VOY701 (SEQ ID NO: 223), VOY801 (SEQ ID NO: 224), VOY1101 (SEQ ID NO: 225) (see Table 10 below).

[0300] In certain embodiments, the AAV used in the compositions and methods described herein is an AAV2/Rec2 or AAV2/Rec3 vector, which have hybrid capsid sequences derived from AAV8 capsids and capsids of serotypes cy5, rh20 or rh39 as described in Charbel Issa et al., 2013, PLoS One 8(4): e60361, which is incorporated by reference herein for these vectors. In certain embodiments, the AAV that is used in the methods described herein is an AAV disclosed in any of the following patents and patent applications, each of which is incorporated herein by reference in its entirety: U.S. Pat. Nos. 7,906,111; 8,524,446; 8,999,678; 8,628,966; 8,927,514; 8,734,809; 9,284,357; 9,409,953; 9,169,299; 9,193,956; 9,458,517; and 9,587,282 US patent application publication nos. 2015/0374803; 2015/0126588; 2017/0067908; 2013/0224836; 2016/0215024; 2017/0051257; and International Patent Application Nos. PCT/US2015/034799; PCT/EP2015/053335. AAV9-based, and AAVrh10-based viral vectors are used in certain of the methods described herein. Nucleotide sequences of AAV based viral vectors and methods of making recombinant AAV and AAV capsids are taught, for example, in U.S. Pat. No. 7,282,199 B2, U.S. Pat. No. 7,790,449 B2, U.S. Pat. No. 8,318,480 B2, U.S. Pat. No. 8,962,332 B2 and International Patent Application No. PCT/EP2014/076466, each of which is incorporated herein by reference in its entirety. In one aspect, provided herein are AAV (e.g., AAV9 or AAVrh10)-based viral vectors encoding a transgene. The amino acid sequences of AAV capsids, including AAV9 and AAVrh10 are provided in FIG. 2 and Table 10 (SEQ ID NOs: 124-133 and 219-225).

TABLE 10
Amino Acid Sequences of AAV Capsids

SEQ
ID

| Capsid | NO: | Amino Acid Sequence |
|---|---|---|
| AAV.PHP.eB | 219 | MAADGYLPDW LEDNLSEGIR EWWALKPGAP QPKANQQHQD NARGLVLPGY |
| (California | | KYLGPGNGLD KGEPVNAADA AALEHDKAYD QQLKAGDNPY LKYNHADAEF |
| Institute of | | QERLKEDTSF GGNLGRAVFQ AKKRLLEPLG LVEEAAKTAP GKKRPVEQSP |
| Technology-Chan | | QEPDSSAGIG KSGAQPAKKR LNFGQTGDTE SVPDPQPIGE PPAAPSGVGS |
| et al 2017, Nat | | LTMASGGGAP VADNNEGADG VGSSSGNWHC DSQWLGDRVI TTSTRTWALP |
| Neurosci | | TYNNHLYKQI SNSTSGGSSN DNAYFGYSTP WGYFDFNRFH CHFSPRDWQR |
| 20(8): 1172-1179) | | LINNNWGFRP KRLNFKLFNI QVKEVTDNNG VKTIANNLTS TVQVFTDSDY |
| | | QLPYVLGSAH EGCLPPFPAD VEMIPQYGYL TLNDGSQAVG RSSFYCLEYF |
| | | PSQMLRTGNN FQFSYEFENV PFHSSYAHSQ SLDRLMNPLI DQYLYYLSRT |
| | | INGSGQNQQT LKFSVAGPSN MAVQGRNYIP GPSYRQQRVS TTVTQNNNSE |
| | | FAWPGASSWA LNGRNSLMNP GPAMASHKEG EDRFFPLSGS LIFGKQGTGR |
| | | DNVDADKVMI TNEEEIKTTN PVATESYGQV ATNHQSDGTL AVPFKAQAQT |
| | | GWVQNQGILP GMVWQDRDVY LQGPIWAKIP HTDGNFHPSP LMGGFGMKHP |
| | | PPQILIKNTP VPADPPTAFN KDKLNSFITQ YSTGQVSVEI EWELQKENSK |
| | | RWNPEIQYTS NYYKSNNVEF AVNTEGVYSE PRPIGTRYLT RNL |
| AAV.PHP.B | 220 | MAADGYLPDW LEDNLSEGIR EWWALKPGAP QPKANQQHQD NARGLVLPGY |
| (California | | KYLGPGNGLD KGEPVNAADA AALEHDKAYD QQLKAGDNPY LKYNHADAEF |
| Institute of | | QERLKEDTSF GGNLGRAVFQ AKKRLLEPLG LVEEAAKTAP GKKRPVEQSP |
| Technology | | QEPDSSAGIG KSGAQPAKKR LNFGQTGDTE SVPDPQPIGE PPAAPSGVGS |
| GenBank entry: | | LTMASGGGAP VADNNEGADG VGSSSGNWHC DSQWLGDRVI TTSTRTWALP |
| ALU85156.1- | | TYNNHLYKQI SNSTSGGSSN DNAYFGYSTP WGYFDFNRFH CHFSPRDWQR |
| Deverman et al | | LINNNWGFRP KRLNFKLFNI QVKEVTDNNG VKTIANNLTS TVQVFTDSDY |
| 2016 Nature | | QLPYVLGSAH EGCLPPFPAD VFMIPQYGYL TLNDGSQAVG RSSFYCLEYF |
| Biotech 34(2): | | PSQMLRTGNN FQFSYEFENV PFHSSYAHSQ SLDRLMNPLI DQYLYYLSRT |
| 204-9) | | INGSGQNQQT LKFSVAGPSN MAVQGRNYIP GPSYRQQRVS TTVTQNNNSE |
| | | FAWPGASSWA LNGRNSLMNP GPAMASHKEG EDRFFPLSGS LIFGKQGTGR |
| | | DNVDADKVMI TNEEEIKTTN PVATESYGQV ATNHQSAQTL AVPFKAQAQT |
| | | GWVQNQGILP GMVWQDRDVY LQGPIWAKIP HTDGNFHPSP LMGGFGMKHP |
| | | PPQILIKNTP VPADPPTAFN KDKLNSFITQ YSTGQVSVEI EWELQKENSK |
| | | RWNPEIQYTS NYYKSNNVEF AVNTEGVYSE PRPIGTRYLT RNL |
| VOY101 | 221 | MAADGYLPDW LEDNLSEGIR EWWALKPGAP QPKANQQHQD NARGLVLPGY |
| | | KYLGPGNGLD KGEPVNAADA AALEHDKAYD QQLKAGDNPY LKYNHADAEF |
| | | QERLKEDTSF GGNLGRAVFQ AKKRLLEPLG LVEEAAKTAP GKKRPVEQSP |
| | | QEPDSSAGIG KSGAQPAKKR LNFGQTGDTE SVPDPQPIGE PPAAPSGVGS |
| | | LTMASGGGAP VADNNEGADG VGSSSGNWHC DSQWLGDRVI TTSTRTWALP |
| | | TYNNHLYKQI SNSTSGGSSND NAYFGYSTPW GYFDFNRFHC HFSPRDWQRL |
| | | INNNWGFRPK RLNFKLFNIQ VKEVTDNNGV KTIANNLTST VQVFTDSDYQ |
| | | LPYVLGSAHE GCLPPFPADV FMIPQYGYLT LNDGSQAVGR SSFYCLEYFP |
| | | SQMLRTGNNF QFSYEFENVP FHSSYAHSQS LDRLMNPLID QYLYYLSKTI |
| | | NGSGQNQQTL KFSVAGPSNM AVQGRNYIPG PSYRQQRVST TVTQNNNSEF |
| | | AWPGASSWAL NGRNSLMNPG PAMASHKEGE DRFFPLSGSL IFGKQGTGRD |
| | | NVDADKVMIT NEEEIKTTNP VATESYGQVA TNHQSDGTLA VPFKAQAQTG |
| | | WVQNQGILPG MVWQDRDVYL QGPIWAKIPH TDGNFHPSPL MGGFGMKHPP |
| | | PQILIKNTPV PADPPTAFNK DKLNSFITQY STGQVSVEIE WELQKENSKR |
| | | WNPEIQYTSN YYKSNNVEFA VNTEGVYSEP RPIGTRYLTR NL |
| VOY201 | 222 | MAADGYLPDW LEDNLSEGIR EWWALKPGAP QPKANQQHQD NARGLVLPGY |
| | | KYLGPGNGLD KGEPVNAADA AALEHDKAYD QQLKAGDNPY LKYNHADAEF |
| | | QERLKEDTSF GGNLGRAVFQ AKKRLLEPLG LVEEAAKTAP GKKRPVEQSP |
| | | QEPDSSAGIG KSGAQPAKKR LNFGQTGDTE SVPDPQPIGE PPAAPSGVGS |
| | | LTMASGGGAP VADNNEGADG VGSSSGNWHC DSQWLGDRVI TTSTRTWALP |
| | | TYNNHLYKQI SNSTSGGSSN DNAYFGYSTP WGYFDFNRFH CHFSPRDWQR |
| | | LINNNWGFRP KRLNFKLFNI QVKEVTDNNG VKTIANNLTS TVQVFTDSDY |
| | | QLPYVLGSAH EGCLPPFPAD VFMIPQYGYL TLNDGSQAVG RSSFYCLEYF |
| | | PSQMLRTGNN FQFSYEFENV PFHSSYAHSQ SLDRLMNPLI DQYLYYLSKT |
| | | INGSGQNQQT LKFSVAGPSN MAVQGRNYIP GPSYRQQRVS TTVTQNNNSE |
| | | FAWPGASSWA LNGRNSLMNP GPAMASHKEG EDRFFPLSGS LIFGKQGTGR |
| | | DNVDADKVMI TNEEEIKTTN PVATESYGQV ATNHQSAQTL AVPFKAQAQT |
| | | GWVQNQGILP GMVWQDRDVY LQGPIWAKIP HTDGNFHPSP LMGGFGMKHP |
| | | PPQILIKNTP VPADPPTAFN KDKLNSFITQ YSTGQVSVEI EWELQKENSK |
| | | RWNPEIQYTS NYYKSNNVEF AVNTEGVYSE PRPIGTRYLT RNL |
| VOY701 | 223 | MAADGYLPDW LEDNLSEGIR EWWALKPGAP QPKANQQHQD NARGLVLPGY |
| | | KYLGPGNGLD KGEPVNAADA AALEHDKAYD QQLKAGDNPY LKYNHADAEF |
| | | QERLKEDTSF GGNLGRAVFQ AKKRLLEPLG LVEEAAKTAP GKKRPVEQSP |
| | | QEPDSSAGIG KSGAQPAKKR LNFGQTGDTE SVPDPQPIGE PPAAPSGVGS |
| | | LTMASGGGAP VADNNEGADG VGSSSGNWHC DSQWLGDRVI TTSTRTWALP |
| | | TYNNHLYKQI SNSTSGGSSN DNAYFGYSTP WGYFDFNRFH CHFSPRDWQR |
| | | LINNNWGFRP KRLNFKLFNI QVKEVTDNNG VKTIANNLTS TVQVFTDSDY |
| | | QLPYVLGSAH EGCLPPFPAD VFMIPQYGYL TLNDGSQAVG RSSFYCLEYF |
| | | PSQMLRTGNN FQFSYEFENV PFHSSYAHSQ SLDRLMNPLI DQYLYYLSRT |
| | | INGSGQNQQT LKFSVAGPSN MAVQGRNYIP GPSYRQQRVS TTVTQNNNSE |
| | | FAWPGASSWA LNGRNSLMNP GPAMASHKEG EDRFFPLSGS LIFGKQGTGR |
| | | DNVDADKVMI TNEEEIKTTN PVATESYGQV ATNHQSESTL AVPFKAQAQT |
| | | GWVQNQGILP GMVWQDRDVY LQGPIWAKIP HTDGNFHPSP LMGGFGMKHP |
| | | PPQILIKNTP VPADPPTAFN KDKLNSFITQ YSTGQVSVEI EWELQKENSK |
| | | RWNPEIQYTS NYYKSNNVEF AVNTEGVYSEP RPIGTRYLTRN L |
| VOY801 | 224 | MAADGYLPDW LEDNLSEGIR EWWALKPGAP QPKANQQHQD NARGLVLPGY |
| | | KYLGPGNGLD KGEPVNAADA AALEHDKAYD QQLKAGDNPY LKYNHADAEF |
| | | QERLKEDTSF GGNLGRAVFQ AKKRLLEPLG LVEEAAKTAP GKKRPVEQSP |
| | | QEPDSSAGIG KSGAQPAKKR LNFGQTGDTE SVPDPQPIGE PPAAPSGVGS |
| | | LTMASGGGAP VADNNEGADG VGSSSGNWHC DSQWLGDRVI TTSTRTWALP |
| | | TYNNHLYKQI SNSTSGGSSN DNAYFGYSTP WGYFDENRFH CHFSPRDWQR |
| | | LINNNWGFRP KRLNFKLEN IQVKEVTDN NGVKTIANN LTSTVQVFT |
| | | DSDYQLPYV LGSAHEGCL PPFPADVFM IPQYGYLTL NDGSQAVGR |
| | | SSFYCLEYF PSQMLRTGN NFQFSYEFE NVPFHSSYA HSQSLDRLM |
| | | NPLIDQYLY YLSRTINGS GQNQQTLKF SVAGPSNMA VQGRNYIPG |
| | | PSYRQQRVS TTVTQNNNS EFAWPGASS WALNGRNSL MNPGPAMAS |
| | | HKEGEDRFF PLSGSLIFG KQGTGRDNV DADKVMITN EEEIKTTNP |
| | | VATESYGQV ATNHQSGGT LAVPFKAQA QTGWVQNQG ILPGMVWQD |
| | | RDVYLQGPI WAKIPHTDG NFHPSPLMG GFGMKHPPP QILIKNTPV |
| | | PADPPTAFN KDKLNSFIT QYSTGQVSV EIEWELQKE NSKRWNPEI |
| | | QYTSNYYKS NNVEFAVNTE GVYSEPRPIG TRYLTRNL |
| VOY1101 | 225 | MAADGYLPDW LEDNLSEGIR EWWALKPGAP QPKANQQHQD NARGLVLPGY |
| | | KYLGPGNGLD KGEPVNAADA AALEHDKAYD QQLKAGDNPY LKYNHADAEF |
| | | QERLKEDTSF GGNLGRAVFQ AKKRLLEPLG LVEEAAKTAP GKKRPVEQSP |
| | | QEPDSSAGIG KSGAQPAKKR LNFGQTGDTE SVPDPQPIGE PPAAPSGVGS |
| | | LTMASGGGAP VADNNEGADG VGSSSGNWHC DSQWLGDRVI TTSTRTWALP |
| | | TYNNHLYKQI SNSTSGGSSN DNAYFGYSTP WGYFDFNRFH CHFSPRDWQR |
| | | LINNNWGFRP KRLNFKLFNI QVKEVTDNNG VKTIANNLTS TVQVFTDSDY |
| | | QLPYVLGSAH EGCLPPFPAD VFMIPQYGYL TLNDGSQAVG RSSFYCLEYF |
| | | PSQMLRTGNN FQFSYEFENV PFHSSYAHSQ SLDRLMNPLI DQYLYYLSRT |
| | | INGSGQNQQT LKFSVAGPSN MAVQGRNYIP GPSYRQQRVS TTVTQNNNSE |
| | | FAWPGASSWA LNGRNSLMNP GPAMASHKEG EDRFFPLSGS LIFGKQGTGR |
| | | DNVDADKVMI TNEEEIKTTN PVATESYGQV ATNHQSDGTL ATPFKAQAQT |
| | | GWVQNQGILP GMVWQDRDVY LQGPIWAKIP HTDGNFHPSP LMGGFGMKHP |
| | | PPQILIKNTP VPADPPTAFN KDKLNSFITQ YSTGQVSVEI EWELQKENSK |
| | | RWNPEIQYTS NYYKSNNVEF AVNTEGVYSEP RPIGTRYLTR NL |

[0301] Another aspect of the present invention relates to the genetic engineering of tandem nucleic acid regulatory elements and incorporating these nucleic acid sequences in a vector expression system. In one embodiment, the vector is a viral vector, including but not limited to recombinant adeno-associated viral (rAAV) vectors (e.g. Gao G., et al 2003 Proc. Natl. Acad. Sci. U.S.A. 100(10):6081-6086), lentiviral vectors (e.g. Matrai, J, et al. 2011, Hepatology 53, 1696-707), retroviral vectors (e.g. Axelrod, J H, et al. 1990. Proc Natl Acad Sci USA; 87, 5173-7), adenoviral vectors (e.g. Brown et al., 2004 Blood 103, 804-10), herpes-simplex viral vectors (Marconi, P. et al. Proc Natl Acad Sci USA. 1996 93(21): 11319-11320; Baez, M V, et al. Chapter 19—Using Herpes Simplex Virus Type 1-Based Amplicon Vectors for Neuroscience Research and Gene Therapy of Neurologic Diseases, Ed.: Robert T. Gerlai, Molecular-Genetic and Statistical Techniques for Behavioral and Neural Research, Academic Press, 2018: Pages 445-477), and retrotransposon-based vector systems (e.g. Soifer, 2004, Current Gene Therapy 4(4):373-384). In another embodiment, the vector is a non-viral vector. rAAV vectors have limited packaging capacity of the vector particles (i.e. approximately 4.7 kb), constraining the size of the transgene expression cassette to obtain functional vectors (Jiang et al., 2006 Blood. 108:107-15). The length of the transgene and the length of the regulatory nucleic acid sequences comprising promoter(s) with or without composite enhancer elements are taken into consideration when selecting a regulatory region suitable for a particular mAb transgene and the target tissue.

[0302] Another aspect of the present invention relates to a viral vector comprising an expression cassette comprising a nucleic acid regulatory element, such as a promoter with or without an enhancer element, operably linked to a mAb transgene. In some embodiments, the expression cassette comprises the nucleic acid sequence of SEQ ID NOs: 7, 8, 9, 10, 11, 12, 13, 14, or 15, or a variant thereof having 95%, 96%, 97%, 98% or 99% identity thereof, which encodes an anti-Tau antibody. Also included are nucleic acid sequences found in Tables 1, 5, 11D, 11E, 11F, or 11G or a variant thereof having 95%, 96%, 97%, 98% or 99% identity thereof, which encodes an anti-Tau antibody, antigen binding domain thereof or recombinant form thereof.

[0303] In another aspect, the expression cassettes are suitable for packaging in an AAV capsid, as such the cassette comprises (1) AAV inverted terminal repeats (ITRs) flank the expression cassette; (2) regulatory control elements, a) promoter/enhancers, including but not limited to any one of the promoters as in Table 8, b) a poly A signal, and c) optionally an intron; and (3) a transgene providing (e.g., coding for) at least one of the heavy chain or light chain of an anti-Tau mAb.

[0304] In certain embodiments, the transgene has a heavy and light chain variable domain as encoded by the nucleotide sequences of Table 1 or has an amino acid sequence of the heavy and light chain variable domains or Fab portions as in Table 2 or Table 11G, or the scFv or scFv-Fcs encoded by the nucleotide sequence of Table 11D, 11E, or 11F, or having an amino acid sequence of Table 11B, 11C, or 11F. In other embodiments for expressing an intact or substantially intact mAb, the constructs described herein comprise the following components: (1) AAV2 inverted terminal repeats that flank the expression cassette; (2) regulatory control elements, a) promoter/enhancers, including but not limited to any one of the promoters as in Table 8, b) a poly A signal, and c) optionally an intron; and (3) nucleic acid sequences coding for the light chain and heavy chain of an anti-Tau mAb, wherein the heavy chain (Fab and, optionally Fc region) and the light chain are separated by a self-cleaving furin (F)/F2A or furin (F)/T2A or flexible linker, ensuring expression of adequate amounts of the heavy and the light chain polypeptides.

[0305] In other embodiments for expressing a Fab mAb, the constructs described herein comprise the following components: (1) AAV2 inverted terminal repeats that flank the expression cassette; (2) regulatory control elements, a) promoter/enhancers, including but not limited to any one of the promoters as in Table 8, b) a poly A signal, and c) optionally an intron; and (3) nucleic acid sequences for the light chain and heavy chain of an anti-Tau mAb, wherein the heavy chain (Fab region only; VH—C_{H}1, or VH and C_{H}1) and the light chain (VL and CL) are separated by a self-cleaving furin (F)/F2A or furin (F)/T2a or flexible linker, ensuring expression of adequate amounts of the heavy and the light chain polypeptides.

[0306] In other embodiments for expressing a Fab′ or F(ab′)₂ mAb, the constructs described herein comprise the following components: (1) AAV2 inverted terminal repeats that flank the expression cassette; (2) regulatory control elements, a) promoter/enhancers, including but not limited to any one of the promoters as in Table 8, b) a poly A signal, and c) optionally an intron; and (3) nucleic acid sequences for the light chain and heavy chain of an anti-Tau mAb, wherein the heavy chain (Fab region only; VH—C_{H}1, or VH, C_{H}1 and all or part of the hinge region) and the light chain (VL and CL) are separated by a self-cleaving furin (F)/F2A or furin (F)/T2a or flexible linker, ensuring expression of adequate amounts of the heavy and the light chain polypeptides, wherein the F(ab′)₂ fragment has two antigen-binding Fab portions linked together by disulfide bonds. In other embodiments, the nucleic acid transgene encodes a polypeptide of Table 2 or 5 or Table 11B, 11C, 11F, or 11G.

[0307] In embodiments related to expression of an ScFv or ScFv-Fc, the constructs described herein comprise the following components: (1) AAV2 inverted terminal repeats that flank the expression cassette; (2) regulatory control elements, a) promoter/enhancers, including but not limited to any one of the promoters as in Table 8, b) a poly A signal, and c) optionally an intron; and (3) nucleic acid sequences encoding for an anti-Tau mAb, wherein the heavy chain variable domain and the light chain variable domain as in Table 1, or a codon-optimized and/or CpG-depleted variant thereof, are separated by a flexible linker (scFvs, for example, as encoded by nucleotide sequences of Table 11C; or scFv-Fcs, for example, as encoded by nucleotide sequences of Table 11E or 11F); and optionally 4) operably linked to a nucleic acid sequence encoding an Fc domain, containing at least a C_{H}2 and C_{H}3 domain. FIGS. 1A and 1B. In some aspects, the ITR to ITR expression cassette comprises the nucleotides sequence of SEQ ID NO: 369 or 372.

[0308] In other embodiments for expressing a diabody, the constructs described herein comprise the following components: (1) AAV2 inverted terminal repeats that flank the expression cassette; (2) regulatory control elements, a) promoter/enhancers, including but not limited to any one of the promoters as in Table 8, b) a poly A signal, and c) optionally an intron; and (3) nucleic acid sequences for the heavy chain variable region (VH) and light chain variable region (VL) of an anti-Tau mAb, wherein the VH and the VL are separated by a flexible linker, ensuring expression of adequate amounts of the VH-VL or VL-VH polypeptides such that each single-chain polypeptide dimerizes with its complement. FIGS. 1A and 1C.

[0309] In the various embodiments, the target tissue may be neural tissue, or endothelial tissue, such as the cellular matrix of the blood brain barrier, or a particular receptor, and the regulatory agent is derived from a heterologous protein or domain that specifically recognizes and/or binds that tissue, particularly in the CNS. The transgenes may also be expressed in liver, or muscle and liver, if administered systemically allowing for systemic (or serum) expression, since circulating antibody proteins are known to cross the blood brain barrier to the CNS thus delivering the Tau therapeutics to the CNS.

[0310] The provided nucleic acids and methods are suitable for use in the production of any isolated recombinant AAV particles, in the production of a composition comprising any isolated recombinant AAV particles, or in the method for treating a Tau-related disease or disorder in a subject in need thereof comprising the administration of any isolated recombinant AAV particles. As such, the rAAV may be of any serotype, modification, or derivative, known in the art, or any combination thereof (e.g., a population of rAAV particles that comprises two or more serotypes, e.g., comprising two or more of rAAV2, rAAV8, and rAAV9 particles) known in the art. In some embodiments, the rAAV particles are AAV1, AAV2, rAAV3, AAV4, AAV5, AAV6, AAV7, AAV8, AAV9, AAV10, AAV11, AAV12, AAV13, AAV14, AAV15, AAV16, AAV.rh8, AAV.rh10, AAV.rh20, AAV.rh39, AAV.Rh74v1, AAV.Rh74v2, AAV.RHM4-1, AAV.hu37, AAV.Anc80, AAV.Anc80L65, AAV.7m8, AAV.PHP.B, AAV.PHP.eB, AAV2.5, AAV2tYF, AAV3B, AAV.LK03, AAV.HSC1, AAV.HSC2, AAV.HSC3, AAV.HSC4, AAV.HSC5, AAV.HSC6, AAV.HSC7, AAV.HSC8, AAV.HSC9, AAV.HSC10, AAV.HSC11, AAV.HSC12, AAV.HSC13, AAV.HSC14, AAV.HSC15, or AAV.HSC16 or other rAAV particles, or combinations of two or more thereof.

[0311] In some embodiments, rAAV particles have a capsid protein from an AAV serotype selected from AAV1, AAV1, AAV2, rAAV3, AAV4, AAV5, AAV6, AAV7, AAV8, AAV9, AAV10, AAV11, AAV-12, AAV13, AAV14, AAV15, AAV16, AAV.rh8, AAV.rh10, AAV.rh20, AAV.rh39, AAV.Rh74v1, AAV.Rh74v2, AAV.RHM4-1, AAV.hu37, AAV.Anc80, AAV.Anc80L65, AAV.7m8, AAV.PHP.B, AAV.PHP.eB, AAV2.5, AAV2tYF, AAV3B, AAV.LK03, AAV.HSC1, AAV.HSC2, AAV.HSC3, AAV.HSC4, AAV.HSC5, AAV.HSC6, AAV.HSC7, AAV.HSC8, AAV.HSC9, AAV.HSC10, AAV.HSC11, AAV.HSC12, AAV.HSC13, AAV.HSC14, AAV.HSC15, or AAV.HSC16 or a derivative, modification, or pseudotype thereof. In some embodiments, rAAV particles comprise a capsid protein at least 80% or more identical, e.g., 85%, 85%, 87%, 88%, 89%, 90%, 91%, 92%, 93%, 94%, 95%, 96%, 97%, 98%, 99%, 99.5%, etc., i.e. up to 100% identical, to e.g., VP1, VP2 and/or VP3 sequence of an AAV capsid serotype selected from AAV1, AAV1, AAV2, AAV3, AAV4, AAV5, AAV6, AAV7, AAV8, AAV9, AAV10, AAV11, AAV12, AAV13, AAV14, AAV15, AAV16, AAV.rh8, AAV.rh10, AAV.rh20, AAV.rh39, AAV.Rh74v1, AAV.Rh74v2, AAV.RHM4-1, AAV.hu37, AAV.Anc80, rAAV.Anc80L65, AAV.7m8, AAV.PHP.B, AAV.PHP.eB, AAV2.5, AAV2tYF, AAV3B, AAV.LK03, AAV.HSC1, AAV.HSC2, AAV.HSC3, AAV.HSC4, AAV.HSC5, AAV.HSC6, AAV.HSC7, AAV.HSC8, AAV.HSC9, AAV.HSC10, AAV.HSC11, AAV.HSC12, AAV.HSC13, AAV.HSC14, AAV.HSC15, or AAV.HSC16.

[0312] In some embodiments, rAAV particles comprise a capsid protein from an AAV capsid serotype selected from AAV1, AAV1, AAV2, rAAV3, AAV4, AAV5, AAV6, AAV7, AAV8, AAV9, AAV10, AAV11, AAV12, AAV13, AAV14, AAV15, AAV16, AAV.rh8, AAV.rh10, AAV.rh20, AAV.rh39, AAV.Rh74v1, AAV.Rh74.v2, AAV.RHM4-1, AAV.hu37, AAV.Anc80, AAV.Anc80L65, AAV.7m8, AAV.PHP.B, AAV.PHP.eB, AAV2.5, AAV2tYF, AAV3B, AAV.LK03, AAV.HSC1, AAV.HSC2, AAV.HSC3, AAV.HSC4, AAV.HSC5, AAV.HSC6, AAV.HSC7, AAV.HSC8, AAV.HSC9, AAV.HSC10, AAV.HSC11, AAV.HSC12, AAV.HSC13, AAV.HSC14, AAV.HSC15, or AAV.HSC16, or a derivative, modification, or pseudotype thereof. In some embodiments, rAAV particles comprise a capsid protein at least 80% or more identical, e.g., 85%, 85%, 87%, 88%, 89%, 90%, 91%, 92%, 93%, 94%, 95%, 96%, 97%, 98%, 99%, 99.5%, etc., i.e. up to 100% identical, to e.g., VP1, VP2 and/or VP3 sequence of an AAV capsid serotype selected from AAV1, AAV1, AAV2, AAV3, AAV4, AAV5, AAV6, AAV7, AAV8, AAV9, AAV10, AAV11, AAV12, AAV13, AAV14, AAV15, AAV16, AAV.rh8, AAV.rh10, AAV.rh20, AAV.rh39, AAV.Rh74v1, AAV.Rh74v2, AAV.RHM4-1, AAV.hu37, AAV.Anc80, AAV.Anc80L65, AAV.7m8, AAV.PHP.B, AAV.PHP.eB, AAV2.5, AAV2tYF, AAV3B, AAV.LK03, AAV.HSC1, AAV.HSC2, AAV.HSC3, AAV.HSC4, AAV.HSC5, AAV.HSC6, AAV.HSC7, AAV.HSC8, AAV.HSC9, AAV.HSC10, AAV.HSC11, AAV.HSC12, AAV.HSC13, AAV.HSC14, AAV.HSC15, or AAV.HSC16.

[0313] In some embodiments, rAAV particles comprise the capsid of Anc80 or Anc80L65, as described in Zinn et al., 2015, Cell Rep. 12(6): 1056-1068, which is incorporated by reference in its entirety. In certain embodiments, the rAAV particles comprise the capsid with one of the following amino acid insertions: LGETTRP or LALGETTRPA, as described in U.S. Pat. Nos. 9,193,956; 9,458,517; and 9,587,282 and US patent application publication no. 2016/0376323, each of which is incorporated herein by reference in its entirety. In some embodiments, rAAV particles comprise the capsid of AAV.7m8, as described in U.S. Pat. Nos. 9,193,956; 9,458,517; and 9,587,282 and US patent application publication no. 2016/0376323, each of which is incorporated herein by reference in its entirety. In some embodiments, rAAV particles comprise any AAV capsid disclosed in U.S. Pat. No. 9,585,971, such as AAV-PHP.B. In some embodiments, rAAV particles comprise any AAV capsid disclosed in U.S. Pat. No. 9,840,719 and WO 2015/013313, such as AAV.Rh74 and RHM4-1, each of which is incorporated herein by reference in its entirety. In some embodiments, rAAV particles comprise any AAV capsid disclosed in WO 2014/172669, such as AAV rh.74, which is incorporated herein by reference in its entirety. In some embodiments, rAAV particles comprise the capsid of AAV2/5, as described in Georgiadis et al., 2016, Gene Therapy 23: 857-862 and Georgiadis et al., 2018, Gene Therapy 25: 450, each of which is incorporated by reference in its entirety. In some embodiments, rAAV particles comprise any AAV capsid disclosed in WO 2017/070491, such as AAV2tYF, which is incorporated herein by reference in its entirety. In some embodiments, rAAV particles comprise the capsids of AAVLK03 or AAV3B, as described in Puzzo et al., 2017, Sci. Transl. Med. 29(9): 418, which is incorporated by reference in its entirety. In some embodiments, rAAV particles comprise any AAV capsid disclosed in U.S. Pat. Nos. 8,628,966; 8,927,514; 9,923,120 and WO 2016/049230, such as HSC1, HSC2, HSC3, HSC4, HSC5, HSC6, HSC7, HSC8, HSC9, HSC10, HSC11, HSC12, HSC13, HSC14, HSC15, or HSC16, each of which is incorporated by reference in its entirety.

[0314] In some embodiments, rAAV particles comprise an AAV capsid disclosed in any of the following patents and patent applications, each of which is incorporated herein by reference in its entirety: U.S. Pat. Nos. 7,282,199; 7,906,111; 8,524,446; 8,999,678; 8,628,966; 8,927,514; 8,734,809; 9,284,357; 9,409,953; 9,169,299; 9,193,956; 9,458,517; and 9,587,282; US patent application publication nos. 2015/0374803; 2015/0126588; 2017/0067908; 2013/0224836; 2016/0215024; 2017/0051257; and International Patent Application Nos. PCT/US2015/034799; PCT/EP2015/053335. In some embodiments, rAAV particles have a capsid protein at least 80% or more identical, e.g., 85%, 85%, 87%, 88%, 89%, 90%, 91%, 92%, 93%, 94%, 95%, 96%, 97%, 98%, 99%, 99.5%, etc., i.e. up to 100% identical, to the VP1, VP2 and/or VP3 sequence of an AAV capsid disclosed in any of the following patents and patent applications, each of which is incorporated herein by reference in its entirety: U.S. Pat. Nos. 7,282,199; 7,906,111; 8,524,446; 8,999,678; 8,628,966; 8,927,514; 8,734,809; 9,284,357; 9,409,953; 9,169,299; 9,193,956; 9,458,517; and 9,587,282; US patent application publication nos. 2015/0374803; 2015/0126588; 2017/0067908; 2013/0224836; 2016/0215024; 2017/0051257; and International Patent Application Nos. PCT/US2015/034799; PCT/EP2015/053335.

[0315] In some embodiments, rAAV particles have a capsid protein disclosed in Intl. Appl. Publ. No. WO 2003/052051 (see, e.g., SEQ ID NO: 2 in ′051), PCT/US2019/032387 and PCT/US2019/055756, such as VOY101 (SEQ ID NO: 221), VOY201 (SEQ ID NO: 222), VOY701 (SEQ ID NO: 223), VOY801 (SEQ ID NO: 224), VOY1101 (SEQ ID NO: 225) (see Table 10 above), WO 2005/033321 (see, e.g., SEQ ID NOs: 123 and 88 in ′321), WO 03/042397 (see, e.g., SEQ ID NOs: 2, 81, 85, and 97 in ′397), WO 2006/068888 (see, e.g., SEQ ID NOs: 1 and 3-6 in ′888), WO 2006/110689, (see, e.g., SEQ ID NOs: 5-38 in ′689) WO2009/104964 (see, e.g., SEQ ID NOs: 1-5, 7, 9, 20, 22, 24 and 31 in ′964), WO 2010/127097 (see, e.g., SEQ ID NOs: 5-38 in ′097), and WO 2015/191508 (see, e.g., SEQ ID NOs: 80-294 in ′508), and U. S. Appl. Publ. No. 20150023924 (see, e.g., SEQ ID NOs: 1, 5-10 in ′924), the contents of each of which is herein incorporated by reference in its entirety. In some embodiments, rAAV particles have a capsid protein at least 80% or more identical, e.g., 85%, 85%, 87%, 88%, 89%, 90%, 91%, 92%, 93%, 94%, 95%, 96%, 97%, 98%, 99%, 99.5%, etc., i.e. up to 100% identical, to the VP1, VP2 and/or VP3 sequence of an AAV capsid disclosed in Intl. Appl. Publ. No. WO 2003/052051 (see, e.g., SEQ ID NO: 2 in ′051), WO 2005/033321 (see, e.g., SEQ ID NOs: 123 and 88 in ′321), WO 03/042397 (see, e.g., SEQ ID NOs: 2, 81, 85, and 97 in ′397), WO 2006/068888 (see, e.g., SEQ ID NOs: 1 and 3-6 in ′888), WO 2006/110689 (see, e.g., SEQ ID NOs: 5-38 in ′689) WO2009/104964 (see, e.g., SEQ ID NOs: 1-5, 7, 9, 20, 22, 24 and 31 in ′964), WO 2010/127097 (see, e.g., SEQ ID NOs: 5-38 in ′097), and WO 2015/191508 (see, e.g., SEQ ID NOs: 80-294 of in ′508), and U.S. Appl. Publ. No. 20150023924 (see, e.g., SEQ ID NOs: 1, 5-10 in ′924).

[0316] Nucleic acid sequences of AAV based viral vectors and methods of making recombinant AAV and AAV capsids are taught, for example, in U.S. Pat. Nos. 7,282,199; 7,906,111; 8,524,446; 8,999,678; 8,628,966; 8,927,514; 8,734,809; 9,284,357; 9,409,953; 9,169,299; 9,193,956; 9,458,517; and 9,587,282; US patent application publication nos. 2015/0374803; 2015/0126588; 2017/0067908; 2013/0224836; 2016/0215024; 2017/0051257; International Patent Application Nos. PCT/US2015/034799; PCT/EP2015/053335; WO 2003/052051, WO 2005/033321, WO 03/042397, WO 2006/068888, WO 2006/110689, WO2009/104964, WO 2010/127097, and WO 2015/191508, and U.S. Appl. Publ. No. 20150023924.

[0317] The provided methods are suitable for used in the production of recombinant AAV encoding an antibody transgene. In some embodiments, provided herein are rAAV viral vectors encoding an anti-Tau Fab. In some embodiments, provided herein are rAAV9-based viral vectors encoding a Tau-specific mAb. In some embodiments, provided herein are rAAV viral vectors encoding a full-length Tau-specific (anti-Tau) mAb. In some embodiments, provided herein are rAAV9-based or rAAVrh10-based viral vectors encoding Fab or full-length Tau-specific mAb.

[0318] In additional embodiments, rAAV particles comprise a pseudotyped AAV capsid. In some embodiments, the pseudotyped AAV capsids are rAAV2/9 or rAAV2/rh10 pseudotyped AAV capsids. Methods for producing and using pseudotyped rAAV particles are known in the art (see, e.g., Duan et al., J. Virol., 75:7662-7671 (2001); Halbert et al., J. Virol., 74:1524-1532 (2000); Zolotukhin et al., Methods 28:158-167 (2002); and Auricchio et al., Hum. Molec. Genet. 10:3075-3081, (2001).

[0319] In additional embodiments, rAAV particles comprise a capsid containing a capsid protein chimeric of two or more AAV capsid serotypes. In some embodiments, the capsid protein is a chimeric of 2 or more AAV capsid proteins from AAV serotypes selected from AAV1, AAV1, AAV2, AAV3, AAV4, AAV5, AAV6, AAV7, AAV8, AAV9, AAV10, AAV11, AAV12, AAV13, AAV14, AAV15, AAV16, AAV.rh8, AAV.rh10, AAV.rh20, AAV.rh39, AAV.Rh74v1, AAV.Rh74v2, AAV.RHM4-1, AAV.hu37, AAV.Anc80, AAV.Anc80L65, AAV.7m8, AAV.PHP.B, AAV.PHP.eB, AAV2.5, AAV2tYF, AAV3B, AAV.LK03, AAV.HSC1, AAV.HSC2, AAV.HSC3, AAV.HSC4, AAV.HSC5, AAV.HSC6, AAV.HSC7, AAV.HSC8, AAV.HSC9, AAV.HSC10, AAV.HSC11, AAV.HSC12, AAV.HSC13, AAV.HSC14, AAV.HSC15, or AAV.HSC16.

[0320] In certain embodiments, a single-stranded AAV (ssAAV) can be used. In certain embodiments, a self-complementary vector, e.g., scAAV, can be used (see, e.g., Wu, 2007, Human Gene Therapy, 18(2):171-82, McCarty et al, 2001, Gene Therapy, Vol. 8, Number 16, Pages 1248-1254; and U.S. Pat. Nos. 6,596,535; 7,125,717; and 7,456,683, each of which is incorporated herein by reference in its entirety).

[0321] In some embodiments, rAAV particles in the clarified feed comprise a capsid protein from an AAV capsid serotype selected from AAV9 (SEQ ID NO: 132) or AAVrh10 (SEQ ID NO: 133), AAV.PHP.eB (SEQ ID NO: 219), or AAV.PHP.B (SEQ ID NO: 220). In some embodiments, the rAAV particles have an AAV capsid serotype of AAV1 or a derivative, modification, or pseudotype thereof. In some embodiments, the rAAV particles have an AAV capsid serotype of AAV4 or a derivative, modification, or pseudotype thereof. In some embodiments, the rAAV particles have an AAV capsid serotype of AAV5 or a derivative, modification, or pseudotype thereof. In some embodiments, the rAAV particles have an AAV capsid serotype of AAV9 or a derivative, modification, or pseudotype thereof. In some embodiments, the rAAV particles have an AAV capsid serotype of AAVrh10 or a derivative, modification, or pseudotype thereof.

[0322] In some embodiments, rAAV particles in the clarified feed comprise a capsid protein that is a derivative, modification, or pseudotype of AAV9 (e.g. AAV.PHP.eB or AAV.PHP.B) or AAVrh10 capsid protein. In some embodiments, rAAV particles in the clarified feed comprise a capsid protein that has an AAV9 capsid protein at least 80% or more identical, e.g., 85%, 85%, 87%, 88%, 89%, 90%, 91%, 92%, 93%, 94%, 95%, 96%, 97%, 98%, 99%, 99.5%, etc., i.e. up to 100% identical, to the VP1, VP2 and/or VP3 sequence of AAV9 capsid protein. In some embodiments, rAAV particles in the clarified feed comprise a capsid protein that has an AAV.PHP.eB capsid protein at least 80% or more identical, e.g., 85%, 85%, 87%, 88%, 89%, 90%, 91%, 92%, 93%, 94%, 95%, 96%, 97%, 98%, 99%, 99.5%, etc., i.e. up to 100% identical, to the VP1, VP2 and/or VP3 sequence of AAV.PHP.eB capsid protein. In some embodiments, rAAV particles in the clarified feed comprise a capsid protein that has an AAV.PHP.B capsid protein at least 80% or more identical, e.g., 85%, 85%, 87%, 88%, 89%, 90%, 91%, 92%, 93%, 94%, 95%, 96%, 97%, 98%, 99%, 99.5%, etc., i.e. up to 100% identical, to the VP1, VP2 and/or VP3 sequence of AAV.PHP.B capsid protein.

[0323] In some embodiments, rAAV particles in the clarified feed comprise a capsid protein that is a derivative, modification, or pseudotype of AAVrh10 capsid protein. In some embodiments, rAAV particles in the clarified feed comprise a capsid protein that has an AAVrh10 capsid protein at least 80% or more identical, e.g., 85%, 85%, 87%, 88%, 89%, 90%, 91%, 92%, 93%, 94%, 95%, 96%, 97%, 98%, 99%, 99.5%, etc., i.e. up to 100% identical, to the VP1, VP2 and/or VP3 sequence of AAVrh10 capsid protein.

[0324] In additional embodiments, rAAV particles in the clarified feed comprise a mosaic capsid. Mosaic AAV particles are composed of a mixture of viral capsid proteins from different serotypes of AAV. In some embodiments, rAAV particles in the clarified feed comprise a mosaic capsid containing capsid proteins of a serotype selected from AAV1, AAV2, AAV3, AAV4, AAV5, AAV6, AAV7, AAV8, AAV9, AAV10, AAV11, AAV12, AAV13, AAV14, AAV15, AAV-16, AAV.rh8, AAV.rh10, AAV.rh20, AAV.rh39, AAV.Rh74v1, AAV.Rh74v2, AAV.RHM4-1, AAV.hu37, AAV.Anc80, AAV.Anc80L65, AAV.7m8, AAV.PHP.B, AAV.PHP.eB, AAV2.5, AAV2tYF, AAV3B, AAV.LK03, AAV.HSC1, AAV.HSC2, AAV.HSC3, AAV.HSC4, AAV.HSC5, AAV.HSC6, AAV.HSC7, AAV.HSC8, AAV.HSC9, AAV.HSC10, AAV.HSC11, AAV.HSC12, AAV.HSC13, AAV.HSC14, AAV.HSC15, and AAV.HSC16.

[0325] In some embodiments, rAAV particles in the clarified feed comprise a mosaic capsid containing capsid proteins of a serotype selected from AAV1, AAV2, AAV5, AAV6, AAV7, AAV8, AAV9, AAV.PHP.eB, AAV.PHP.B, AAV10, AAVrh.8, and AAVrh10. In additional embodiments, rAAV particles in the clarified feed comprise a pseudotyped rAAV particle. In some embodiments, the pseudotyped rAAV particle comprises (a) a nucleic acid vector comprising AAV ITRs and (b) a capsid comprised of capsid proteins derived from AAVx (e.g., AAV1, AAV3, AAV4, AAV5, AAV6, AAV7, AAV8, AAV9, AAV10 AAV11, AAV12, AAV13, AAV14, AAV15 and AAV16). In additional embodiments, rAAV particles in the clarified feed comprise a pseudotyped rAAV particle comprised of a capsid protein of an AAV serotype selected from AAV1, AAV2, AAV3, AAV4, AAV5, AAV6, AAV7, AAV8, AAV9, AAV10, AAV11, AAV12, AAV13, AAV14, AAV15, AAV16, AAV.rh8, AAV.rh10, AAV.rh20, AAV.rh39, AAV.Rh74v1, AAV.Rh74v2, AAV.RHM4-1, AAV.hu37, AAV.Anc80, AAV.Anc80L65, AAV.7m8, AAV.PHP.B, AAV.PHP.eB, AAV2.5, AAV2tYF, AAV3B, AAV.LK03, AAV.HSC1, AAV.HSC2, AAV.HSC3, AAV.HSC4, AAV.HSC5, AAV.HSC6, AAV.HSC7, AAV.HSC8, AAV.HSC9, AAV.HSC10, AAV.HSC11, AAV.HSC12, AAV.HSC13, AAV.HSC14, AAV.HSC15, and AAV.HSC16. In additional embodiments, rAAV particles in the clarified feed comprise a pseudotyped rAAV particle containing AAV9 capsid protein. In additional embodiments, rAAV particles in the clarified feed comprise a pseudotyped rAAV particle containing AAV.PHP.B capsid protein. In additional embodiments, rAAV particles in the clarified feed comprise a pseudotyped rAAV particle containing AAV.PHP.eB capsid protein. In additional embodiments, rAAV particles in the clarified feed comprise a pseudotyped rAAV particle is comprised of AAVrh10 capsid protein. In some embodiments, the pseudotyped rAAV9 or rAAVrh10 particles are rAAV2/9 or rAAV2/rh10 pseudotyped particles. Methods for producing and using pseudotyped rAAV particles are known in the art (see, e.g., Duan et al., J. Virol., 75:7662-7671 (2001); Halbert et al., J. Virol., 74:1524-1532 (2000); Zolotukhin et al., Methods 28:158-167 (2002); and Auricchio et al., Hum. Molec. Genet. 10:3075-3081, (2001).

[0326] In additional embodiments, rAAV particles in the clarified feed comprise a capsid containing a capsid protein chimeric of two or more AAV capsid serotypes. In further embodiments, the capsid protein is a chimeric of 2 or more AAV capsid proteins from AAV serotypes selected from AAV1, AAV2, rAAV3, AAV4, AAV5, AAV6, AAV7, AAV8, AAV9, AAV10, AAV11, AAV12, AAV13, AAV14, AAV15, AAV16, AAV.rh8, AAV.rh10, AAV.rh20, AAV.rh39, AAV.Rh74v1, AAV.Rh74v2, AAV.RHM4-1, AAV.hu37, AAV.Anc80, AAV.Anc80L65, AAV.7m8, AAV.PHP.B, AAV.PHP.eB, AAV2.5, AAV2tYF, AAV3B, rAAV.LK03, AAV.HSC1, AAV.HSC2, AAV.HSC3, AAV.HSC4, AAV.HSC5, AAV.HSC6, AAV.HSC7, AAV.HSC8, AAV.HSC9, AAV.HSC10, AAV.HSC11, AAV.HSC12, AAV.HSC13, AAV.HSC14, AAV.HSC15, and AAV.HSC16. In further embodiments, the capsid protein is a chimeric of 2 or more AAV capsid proteins from AAV serotypes selected from AAV1, AAV2, AAV5, AAV6, AAV7, AAV8, AAV9, AAV10, AAVrh.8, and AAVrh.10.

[0327] In some embodiments, the rAAV particles comprise an AAV capsid protein chimeric of AAV9 capsid protein and one or more AAV capsid proteins from an AAV serotype selected from AAV1, AAV2, AAV3, AAV4, AAV5, AAV6, AAV7, AAV8, AAV10, AAV11, AAV12, AAV13, AAV14, AAV15, AAV16, AAV.rh8, AAV.rh10, AAV.rh20, AAV.rh39, AAV.Rh74v1, AAV.Rh74v2, AAV.RHM4-1, AAV.hu37, AAV.Anc80, AAV.Anc80L65, AAV.7m8, AAV.PHP.B, AAV.PHP.eB, AAV2.5, AAV2tYF, AAV3B, AAV.LK03, AAV.HSC1, AAV.HSC2, AAV.HSC3, AAV.HSC4, AAV.HSC5, AAV.HSC6, AAV.HSC7, AAV.HSC8, AAV.HSC9, AAV.HSC10, AAV.HSC11, AAV.HSC12, AAV.HSC13, AAV.HSC14, AAV.HSC15, and AAV.HSC16. In some embodiments, the rAAV particles comprise an AAV capsid protein chimeric of AAV9 capsid protein and one or more AAV capsid proteins from an AAV serotype selected from AAV1, AAV2, AAV5, AAV6, AAV7, AAV8, AAV.PHP.eB, AAV.PHP.B, AAV10, AAVrh.8, and AAVrh.10.

[0328] In some embodiments, the rAAV particles comprise an AAV capsid protein chimeric of AAVrh10 capsid protein the capsid protein of one or more AAV capsid serotypes selected from AAV1, AAV2, AAV3, AAV4, AAV5, AAV6, AAV7, AAV8, AAV9, AAV10, AAV11, AAV12, AAV13, AAV14, AAV15, AAV16, AAV.rh8, AAV.rh20, AAV.rh39, AAV.Rh74v1, AAV.Rh74v2, AAV.RHM4-1, AAV.hu37, AAV.Anc80, AAV.Anc80L65, AAV.7m8, AAV.PHP.B, AAV.PHP.eB, AAV2.5, AAV2tYF, AAV3B, AAV.LK03, AAV.HSC1, AAV.HSC2, AAV.HSC3, AAV.HSC4, AAV.HSC5, AAV.HSC6, AAV.HSC7, AAV.HSC8, AAV.HSC9, AAV.HSC10, AAV.HSC11, AAV.HSC12, AAV.HSC13, AAV.HSC14, AAV.HSC15, and AAV.HSC16.

[0329] In some embodiments, the rAAV particles comprise an AAV capsid protein chimeric of AAV.rh10, capsid protein the capsid protein of one or more AAV capsid serotypes selected from AAV1, AAV2, AAV3, AAV4, AAV5, AAV6, AAV7, AAV8, AAV9, AAV.PHP.eB, AAV.PHP.B, and AAVrh.8.

### 5.8. Methods of Making rAAV Virions Packaging Antibody Transgenes

[0330] Another aspect of the present invention involves making molecules disclosed herein. In some embodiments, a molecule according to the invention is made by providing a polynucleotide comprising the nucleic acid sequence encoding an AAV capsid protein; and using a packaging cell system to prepare corresponding rAAV particles with capsid coats made up of the capsid protein. In some embodiments, the nucleic acid sequence encodes a sequence having at least 60%, 70%, 80%, 85%, 90%, or 95%, preferably 96%, 97%, 98%, 99% or 99.9%, identity to the sequence of a capsid protein molecule described herein, and retains (or substantially retains) biological function of the capsid protein and the inserted peptide from a heterologous protein or domain thereof. In some embodiments, the nucleic acid encodes a sequence having at least 60%, 70%, 80%, 85%, 90%, or 95%, preferably 96%, 97%, 98%, 99% or 99.9%, identity to a particular sequence of the AAV capsid protein, while retaining (or substantially retaining) biological function of the AAV capsid protein.

[0331] The capsid protein, coat, and rAAV particles may be produced by techniques known in the art. In some embodiments, the viral genome comprises at least one inverted terminal repeat to allow packaging into a vector. In some embodiments, the viral genome further comprises a cap gene and/or a rep gene for expression and splicing of the cap gene. In certain embodiments, the cap and rep genes are provided by a packaging cell and not present in the viral genome.

[0332] In some embodiments, the nucleic acid encoding the capsid protein is cloned into an AAV Rep-Cap helper plasmid in place of the existing capsid gene. When introduced together into host cells, this plasmid helps package an rAAV genome into the capsid protein as the capsid coat. Packaging cells can be any cell type possessing the genes necessary to promote AAV genome replication, capsid assembly, and packaging. Nonlimiting examples include 293 cells or derivatives thereof, HELA cells, or insect cells.

[0333] Standard techniques can be used for recombinant DNA, oligonucleotide synthesis, and tissue culture and transformation (e.g., electroporation, lipofection). Enzymatic reactions and purification techniques can be performed according to manufacturer's specifications or as commonly accomplished in the art or as described herein. The foregoing techniques and procedures can be generally performed according to conventional methods well known in the art and as described in various general and more specific references that are cited and discussed throughout the present specification. See, e.g., Sambrook et al., Molecular Cloning: A Laboratory Manual (2d ed., Cold Spring Harbor Laboratory Press, Cold Spring Harbor, N.Y. (1989)), which is incorporated herein by reference for any purpose. Unless specific definitions are provided, the nomenclatures utilized in connection with, and the laboratory procedures and techniques of, analytical chemistry, synthetic organic chemistry, and medicinal and pharmaceutical chemistry described herein are those well-known and commonly used in the art. Standard techniques can be used for chemical syntheses, chemical analyses, pharmaceutical preparation, formulation, and delivery, and treatment of patients. Nucleic acid sequences of AAV-based viral vectors, and methods of making recombinant AAV and AAV capsids, are taught, e.g., in U.S. Pat. Nos. 7,282,199; 7,790,449; 8,318,480; 8,962,332; and PCT/EP2014/076466, each of which is incorporated herein by reference in its entirety.

[0334] In preferred embodiments, the rAAVs provide transgene delivery vectors that can be used in therapeutic and prophylactic applications, as discussed in more detail below. The rAAV vector also includes the regulatory control elements discussed supra to influence the expression of the RNA and/or protein products encoded by nucleic acids (transgenes) within target cells of the subject.

[0335] Provided in particular embodiments are AAV vectors comprising a viral genome comprising an expression cassette for expression of the transgene, under the control of regulatory elements, and flanked by ITRs and an engineered viral capsid as described herein or is at least 95%, 96%, 97%, 98%, 99% or 99.9% identical to the amino acid sequence of the AAV capsid protein.

[0336] The recombinant adenovirus can be a first generation vector, with an E1 deletion, with or without an E3 deletion, and with the expression cassette inserted into either deleted region. The recombinant adenovirus can be a second generation vector, which contains full or partial deletions of the E2 and E4 regions. A helper-dependent adenovirus retains only the adenovirus inverted terminal repeats and the packaging signal (phi). The transgene generally is inserted between the packaging signal and the 3′ITR, with or without stuffer sequences to keep the genome close to wild-type size of approximately 36 kb. An exemplary protocol for production of adenoviral vectors may be found in Alba et al., 2005, “Gutless adenovirus: last generation adenovirus for gene therapy,” Gene Therapy 12:S18-S27, which is incorporated by reference herein in its entirety.

[0337] The rAAV vector for delivering the transgene to target tissues, cells, or organs, may also have a tropism for that particular target tissue, cell, or organ, e.g. liver and/or muscle, in conjunction with the use of tissue-specific promoters as described herein. The construct can further include additional expression control elements such as introns that enhance expression of the transgene (e.g., introns such as the chicken j-actin intron, minute virus of mice (MVM) intron, human factor IX intron (e.g., FIX truncated intron 1), β-globin splice donor/immunoglobulin heavy chain splice acceptor intron, adenovirus splice donor/immunoglobulin splice acceptor intron, SV40 late splice donor/splice acceptor (19S/16S) intron, and hybrid adenovirus splice donor/IgG splice acceptor intron and polyA signals such as the rabbit β-globin polyA signal, human growth hormone (hGH) polyA signal, SV40 late polyA signal, synthetic polyA (SPA) signal, and bovine growth hormone (bGH) polyA signal. See, e.g., Powell and Rivera-Soto, 2015, Discov. Med., 19(102):49-57.

[0338] In certain embodiments, nucleic acids sequences disclosed herein may be codon-optimized, for example, via any codon-optimization technique known to one of skill in the art (see, e.g., review by Quax et al., 2015, Mol Cell 59:149-161). In addition or alternatively, the antibody coding sequences and/or the transgene sequences may be depleted of CpG to reduce immunogenicity.

[0339] In one aspect the nucleic acid sequence encoding the transgene cassette is modified by codon optimization and CpG island depletion. Immune response against an anti-Tau antibody transgene is reduced for a codon-optimized and CpG deleted transgene sequence.

[0340] AAV-directed immune responses can be inhibited by reducing the number of CpG di-nucleotides in the AAV genome [Faust, S. M., et al., CpG-depleted adeno-associated virus vectors evade immune detection. J Clin Invest, 2013. 123(7): p. 2994-3001]. Depleting the transgene sequence of CpG motifs may diminish the role of TLR9 in activation of innate immunity upon recognition of the transgene as non-self, and thus provide stable and prolonged transgene expression. [See also Wang, D., P. W. L. Tai, and G. Gao, Adeno-associated virus vector as a platform for gene therapy delivery. Nat Rev Drug Discov, 2019. 18(5): p. 358-378.; and Rabinowitz, J., Y. K. Chan, and R. J. Samulski, Adeno-associated Virus (AAV) versus Immune Response. Viruses, 2019. 11(2)]. In embodiments, the antibody-encoding cassette is human codon-optimized with CpG depletion. Codon-optimized and CpG depleted nucleic acid sequences may be designed by any method known in the art, including for example, by Thermo Fisher Scientific GeneArt Gene Synthesis tools utilizing GeneOptimizer (Waltham, MA USA)).

[0341] In one embodiment, the constructs described herein comprise the following components: (1) AAV2 inverted terminal repeats that flank the expression cassette; (2) control elements, which include a) a CNS-specific or a ubiquitous promoter, d) a rabbit β-globin poly A signal and e) optionally a chimeric intron derived from human β-globin and Ig heavy chain, or other intron; and (3) transgene providing (e.g., coding for) at least one heavy chain and at least one light chain of the Tau-specific mAbs of interest.

[0342] In another embodiment, the constructs described herein comprise the following components: (1) AAV2 inverted terminal repeats that flank the expression cassette; (2) regulatory control elements, which include a) a CNS-specific or a ubiquitous promoter, d) a rabbit β-globin poly A signal and e) optionally a chimeric intron derived from human 3-globin and Ig heavy chain, or other intron; and (3) transgene encoding for an anti-Tau mAb, wherein the heavy chain variable domain and the light chain variable domain as in Table 1, or a codon-optimized and/or CpG-depleted variant thereof, are separated by a flexible linker (scFvs or scFv-Fcs, for example, having the amino acid sequences in Table 11C or 11E or 11F or as encoded by nucleotide sequences of Table 11D or 11E or 11F, which encoded the components of the scFvs); and optionally 4) operably linked to a nucleic acid sequence encoding an Fc domain, containing at least a C_{H}2 and C_{H}3 domain. FIGS. 1A and 1B. In another embodiment, the constructs described herein comprise the following components: (1) AAV2 inverted terminal repeats that flank the expression cassette; (2) regulatory control elements, which include a) a CNS-specific or a ubiquitous promoter, d) a rabbit β-globin poly A signal and e) optionally a chimeric intron derived from human 3-globin and Ig heavy chain, or other intron; and (3) transgene encoding for the light chain and heavy chain of an anti-Tau mAb, wherein the heavy chain (Fab region only; VH and C_{H}1) and the light chain (VL and CL) are separated by a self-cleaving furin (F)/F2A or furin (F)/T2a or flexible linker, ensuring expression of adequate amounts of the heavy and the light chain polypeptides.

[0343] The viral vectors provided herein may be manufactured using host cells, e.g., mammalian host cells, including host cells from humans, monkeys, mice, rats, rabbits, or hamsters. Nonlimiting examples include: A549, WEHI, 10T1/2, BHK, MDCK, COS1, COS7, BSC 1, BSC 40, BMT 10, VERO, W138, HeLa, 293, Saos, C2C12, L, HT1080, HepG2, primary fibroblast, hepatocyte, and myoblast cells. Typically, the host cells are stably transformed with the sequences encoding the transgene and associated elements (i.e., the vector genome), and genetic components for producing viruses in the host cells, such as the replication and capsid genes (e.g., the rep and cap genes of AAV). For a method of producing recombinant AAV vectors with AAV8 capsids, see Section IV of the Detailed Description of U.S. Pat. No. 7,282,199 B2, which is incorporated herein by reference in its entirety. Genome copy titers of said vectors may be determined, for example, by TAQMAN® analysis. Virions may be recovered, for example, by CsCl₂ sedimentation. Alternatively, baculovirus expression systems in insect cells may be used to produce AAV vectors. For a review, see Aponte-Ubillus et al., 2018, Appl. Microbiol. Biotechnol. 102:1045-1054, which is incorporated by reference herein in its entirety for manufacturing techniques.

[0344] In vitro assays, e.g., cell culture assays, can be used to measure transgene expression from a vector described herein, thus indicating, e.g., potency of the vector. For example, the PER.C6® Cell Line (Lonza), a cell line derived from human embryonic retinal cells, or retinal pigment epithelial cells, e.g., the retinal pigment epithelial cell line hTERT RPE-1 (available from ATCC®), can be used to assess transgene expression. Alternatively, cell lines derived from liver or muscle or other cell types may be used, for example, but not limited, to HuH-7, HEK293, fibrosarcoma HT-1080, HKB-11, C2C12 myoblasts, and CAP cells. Once expressed, characteristics of the expressed product (transgene product) can also be determined, including serum half-life, functional activity of the protein (e.g. enzymatic activity or binding to a target), determination of the glycosylation and tyrosine sulfation patterns, and other assays known in the art for determining protein characteristics.

[0345] In vitro relative potency assays may be performed to relate the vector genome concentration (vector GC or VGC, or titer) to gene expression using ddPCR. The in vitro bioassay may be performed by transducing HEK293 cells and assaying the cell culture supernatant for anti-Tau mAb (e.g. Fab or IgG or ScFv) protein levels. HEK293 cells are plated onto three poly-D-lysine-coated 96-well tissue culture plates overnight. The cells are then pre-infected with wild-type human Ad5 virus followed by transduction with three independently prepared serial dilutions of AAV vector reference standard and test article, with each preparation plated onto separate plates at different positions. On the third day following transduction, the cell culture media is collected from the plates and measured for Tau-binding protein levels via ELISA. For the ELISA, 96-well ELISA plates coated with Tau are blocked and then incubated with the collected cell culture media to capture anti-Tau mAb produced by HEK293 cells. mAb-specific anti-human IgG antibody is used to detect the Tau-captured mAb protein. After washing, horseradish peroxidase (HRP) substrate solution is added, allowed to develop, stopped with stop buffer, and the plates are read in a plate reader. The absorbance or OD of the HRP product is plotted versus log dilution, and the relative potency of each test article is calculated relative to the reference standard on the same plate fitted with a four-parameter logistic regression model after passing the parallelism similarity test, using the formula: EC50 reference÷EC50 test article. The potency of the test article is reported as a percentage of the reference standard potency, calculated from the weighted average of the three plates.

[0346] To relate the ddPCR GC titer to functional gene expression, an in vitro bioassay may be performed by transducing HEK293 cells and assaying for transgene (e.g. enzyme) activity. HEK293 cells are plated onto three 96-well tissue culture plates overnight. The cells are then pre-infected with wild-type human adenovirus serotype 5 virus followed by transduction with three independently prepared serial dilutions of enzyme reference standard and test article, with each preparation plated onto separate plates at different positions. On the second day following transduction, the cells are lysed, treated with low pH to activate the enzyme, and assayed for enzyme activity using a peptide substrate that yields increased fluorescence signal upon cleavage by transgene (enzyme). The fluorescence or RFU is plotted versus log dilution, and the relative potency of each test article is calculated relative to the reference standard on the same plate fitted with a four-parameter logistic regression model after passing the parallelism similarity test, using the formula: EC50 reference+EC50 test article. The potency of the test article is reported as a percentage of the reference standard potency, calculated from the weighted average of the three plates. Vector genome concentration GC can also be evaluated using ddPCR

### 5.9. Therapeutic and Prophylactic Uses

[0347] Another aspect relates to therapies which involve administering a transgene via a rAAV vector according to the invention to a subject in need thereof, for delaying, preventing, treating, and/or managing a Tau-related disease or disorder or tauopathy, and/or ameliorating one or more symptoms associated therewith. A subject in need thereof includes a subject suffering from the Tau-related disease or disorder or tauopathy, or a subject pre-disposed thereto, e.g., a subject at risk of developing or having a recurrence of the Tau-related disease or disorder or tauopathy.

[0348] Tables 1, 5, 11D, 11E, 11F, and 11G hereinabove provide transgenes and nucleic acid sequences for generating transgenes that may be used in any of the rAAV vectors described herein, in particular, to treat or ameliorate various tauopathies and amino acid sequences of the anti-Tau mAbs, heavy and light chain variable domains thereof, constant domains thereof and recombinant forms that may be encoded by the transgenes are provided in Tables 2, 5, 11B, and 11C and described herein. Neurodegenerative tauopathies are a diverse group of neurodegenerative disorders that share a common pathologic lesion consisting of intracellular aggregates of abnormal filaments that are mainly composed of pathologically hyperphosphorylated Tau in neurons and/or glial cells. Clinical features of the tauopathies are heterogeneous and characterized by dementia and/or motor syndromes. The progressive accumulation of filamentous Tau inclusions may cause neuronal and glial degeneration in combination with other deposits as, e.g., beta-amyloid in AD or as a sole pathogenic entity as illustrated by mutations in the tau gene that are associated with familial forms of FTDP-17. Because of the heterogeneity of their clinical manifestations a potentially non-exhaustive list of tauopathic diseases may be provided including AD, ALS-PDC, AGD, British type amyloid angiopathy, cerebral amyloid angiopathy, DBD, CID, dementia pugilistica, diffuse neurofibrillary tangles with calcification, Down's syndrome, FTD, FTDP-17, frontotemporal lobar degeneration, Gerstmann-Straussler-Scheinker disease, Hallervorden-Spatz disease, inclusion body myositis, multiple system atrophy, myotonic dystrophy, NP—C, non-Guamanian motor neuron disease with neurofibrillary tangles, PiD, postencephalitic parkinsonism, prion protein cerebral amyloid angiopathy, progressive subcoitical gliosis, PSP, subacute sclerosing panencephalitis, tangle only dementia, multi-infarct dementia and ischemic stroke; see for a review, e.g., Lee et al. (2001) Annu. Rev. Neurosci. 24, 1121-1159 in which Table 1 catalogs the unique members of tauopathies or Sergeant et al. (2005), Bioch. Biophy. Acta 1739, 179-97, with a list in FIG. 2 therein.

[0349] As described herein, the AAV vector may be engineered as described herein to target the appropriate tissue (CNS) for delivery of the transgene to effect the therapeutic or prophylactic use. The appropriate AAV serotype may be chosen to engineer to optimize the tissue tropism and transduction of the vector.

[0350] Generally, the rAAV vector is administered to the CNS, intracerebroventricular (ICV), intracisternal (IC), including direct injection into the cisterna magna, lumbar intrathecal (IT) or intraparenchymal administration, and following transduction, the vector's production of the protein product is enhanced by an expression cassette employing engineered CNS-specific nucleic acid regulatory elements. In other examples, the rAAV vector may cross the blood brain barrier if provided systemically by intravenous, intramuscular, and/or intra-peritoneal administration. Alternatively, the rAAV is delivered, for example, intravenously, intramuscularly or other parenteral administration such that the rAAV is delivered to the liver where the rAAV transduces liver cells, generating a depot for production of the anti-Tau binding protein and deliver of that protein to the circulation.

[0351] Following transduction of target cells, the expression of the protein product is enhanced by employing such CNS-specific vector delivery methods. Such enhancement may be measured by the following non-limiting list of determinations such as 1) protein titer by assays known to the skilled person, not limited to sandwich ELISA, Western Blot, histological staining, and liquid chromatography tandem mass spectrometry (LC-MS/MS); 2) protein activity, by assays such as binding assays, functional assays, enzymatic assays and/or substrate detection assays; and/or 3) serum half-life or long-term expression. Enhancement of transgene expression may be determined as efficacious and suitable for human treatment (Hintze, J. P. et al, Biomarker Insights 2011:6 69-78). Assessment of the quantitative and functional properties of a Tau-specific mAb transgene using such in vitro and in vivo cellular, blood and tissue studies have been shown to correlate to the efficacy of certain therapies (Hintze, J. P. et al, 2011, supra), and are utilized to evaluate response to gene therapy treatment of the transgene with the vectors described herein.

[0352] The agents may be provided as pharmaceutically acceptable compositions as known in the art and/or as described herein. In some embodiments, the rAAV molecule may be administered alone or in combination with other prophylactic and/or therapeutic agents, such as with prophylactic immunosuppressants.

[0353] The dosage amounts and frequencies of administration provided herein are encompassed by the terms therapeutically effective and prophylactically effective. The dosage and frequency will typically vary according to factors specific for each patient depending on the specific therapeutic or prophylactic agents administered, the severity and type of disease, the route of administration, as well as age, body weight, response, and the past medical history of the patient, and should be decided according to the judgment of the practitioner and each patient's circumstances. Suitable regimens can be selected by one skilled in the art by considering such factors and by following, for example, dosages reported in the literature and recommended in the Physician's Desk Reference (56^{th} ed., 2002). Prophylactic and/or therapeutic agents can be administered repeatedly. Several aspects of the procedure may vary such as the temporal regimen of administering the prophylactic or therapeutic agents, and whether such agents are administered separately or as an admixture.

[0354] The amount of an agent of the invention that will be effective can be determined by standard clinical techniques. Effective doses may be extrapolated from dose-response curves derived from in vitro or animal model test systems. For any agent used in the method of the invention, the therapeutically effective dose can be estimated initially from cell culture assays. A dose may be formulated in animal models to achieve a circulating plasma concentration range that includes the IC₅₀ (i.e., the concentration of the test compound that achieves a half-maximal inhibition of symptoms) as determined in cell culture. Such information can be used to more accurately determine useful doses in humans. Levels in brain tissue or plasma may be measured, for example, by ELISA or high performance liquid chromatography (HPLC).

[0355] Prophylactic and/or therapeutic agents, as well as combinations thereof, can be tested in suitable animal model systems prior to use in humans. Such animal model systems include, but are not limited to, rats, mice, chicken, cows, monkeys, pigs, dogs, rabbits, etc. Any animal system well-known in the art may be used. Such model systems are widely used and well known to the skilled artisan. In some preferred embodiments, animal model systems for a CNS condition are used that are based on rats, mice, or other small mammal other than a primate.

[0356] Once the prophylactic and/or therapeutic agents of the invention have been tested in an animal model, they can be tested in clinical trials to establish their efficacy. Establishing clinical trials will be done in accordance with common methodologies known to one skilled in the art, and the optimal dosages and routes of administration as well as toxicity profiles of agents of the invention can be established. For example, a clinical trial can be designed to test a rAAV molecule of the invention for efficacy and toxicity in human patients.

[0357] A rAAV molecule of the invention generally will be administered for a time and in an amount effective for obtain a desired therapeutic and/or prophylactic benefit. The data obtained from the cell culture assays and animal studies can be used in formulating a range and/or schedule for dosage of the prophylactic and/or therapeutic agents for use in humans. The dosage of such agents lies preferably within a range of circulating concentrations that include the ED₅₀ with little or no toxicity. The dosage may vary within this range depending upon the dosage form employed and the route of administration utilized.

[0358] A therapeutically effective dosage of an rAAV vector for patients is generally from about 0.1 ml to about 100 ml of solution containing concentrations of from about 1×10⁹ to about 1×10¹⁶ genomes rAAV vector, or about 1×10¹⁰ to about 1×10¹⁵, about 1×10¹² to about 1×10¹⁶, or about 1×10¹⁴ to about 1×10¹⁶ AAV genomes. Levels of expression of the transgene can be monitored to determine/adjust dosage amounts, frequency, scheduling, and the like.

[0359] Treatment of a subject with a therapeutically or prophylactically effective amount of the agents of the invention can include a single treatment or can include a series of treatments. For example, pharmaceutical compositions comprising an agent of the invention may be administered once a day, twice a day, or three times a day. In some embodiments, the agent may be administered once a day, every other day, once a week, twice a week, once every two weeks, once a month, once every six weeks, once every two months, twice a year, or once per year. It will also be appreciated that the effective dosage of certain agents, e.g., the effective dosage of agents comprising a dual antigen-binding molecule of the invention, may increase or decrease over the course of treatment.

[0360] Methods of administering agents of the invention include, but are not limited to, intracerebroventricular (ICV), intracisternal (IC), including direct injection into the cisterna magna, lumbar intrathecal (IT) or intraparenchymal administration.

[0361] In certain embodiments, the agents of the invention are administered intravenously and may be administered together with other biologically active agents. In certain embodiments, the transgene is administered intravenously even if intended to be expressed in the CNS.

### 5.10. Pharmaceutical Compositions and Kits

[0362] The invention further provides a pharmaceutical composition comprising a pharmaceutically acceptable carrier and an agent of the invention, said agent comprising a rAAV molecule of the invention comprising a transgene cassette wherein the transgene expression is driven by the chimeric regulatory elements described herein. In preferred embodiments, the pharmaceutical composition comprises rAAV combined with a pharmaceutically acceptable carrier for administration to a subject. In a specific embodiment, the term “pharmaceutically acceptable” means approved by a regulatory agency of the Federal or a state government or listed in the U.S. Pharmacopeia or other generally recognized pharmacopeia for use in animals, and more particularly in humans. The term “carrier” refers to a diluent, adjuvant (e.g., Freund's complete and incomplete adjuvant), excipient, or vehicle with which the agent is administered. Such pharmaceutical carriers can be sterile liquids, such as water and oils, including those of petroleum, animal, vegetable, or synthetic origin, including, e.g., peanut oil, soybean oil, mineral oil, sesame oil and the like. Water is a common carrier when the pharmaceutical composition is administered intravenously. Saline solutions and aqueous dextrose and glycerol solutions can also be employed as liquid carriers, particularly for injectable solutions. Suitable pharmaceutically acceptable carriers, excipients, and stabilizers are employed. These compositions can take the form of solutions, suspensions, emulsion, tablets, pills, capsules, powders, sustained-release formulations and the like.

[0363] In certain embodiments of the invention, pharmaceutical compositions are provided for use in accordance with the methods of the invention, said pharmaceutical compositions comprising a therapeutically and/or prophylactically effective amount of an agent of the invention along with a pharmaceutically acceptable carrier.

[0364] In preferred embodiments, the agent of the invention is substantially purified (i.e., substantially free from substances that limit its effect or produce undesired side-effects). In a specific embodiment, the host or subject is an animal, preferably a mammal such as non-primate (e.g., cows, pigs, horses, cats, dogs, rats etc.) and a primate (e.g., monkey such as, a cynomolgus monkey and a human). In a preferred embodiment, the host is a human.

[0365] The invention provides further kits that can be used in the above methods. In one embodiment, a kit comprises one or more agents of the invention, e.g., in one or more containers. In another embodiment, a kit further comprises one or more other prophylactic or therapeutic agents useful for the treatment of a condition, in one or more containers.

[0366] The invention also provides agents of the invention packaged in a hermetically sealed container such as an ampoule or sachette indicating the quantity of the agent or active agent. In one embodiment, the agent is supplied as a dry sterilized lyophilized powder or water free concentrate in a hermetically sealed container and can be reconstituted, e.g., with water or saline, to the appropriate concentration for administration to a subject. Typically, the agent is supplied as a dry sterile lyophilized powder in a hermetically sealed container at a unit dosage of at least 5 mg, more often at least 10 mg, at least 15 mg, at least 25 mg, at least 35 mg, at least 45 mg, at least 50 mg, or at least 75 mg. The lyophilized agent should be stored at between 2 and 8° C. in its original container and the agent should be administered within 12 hours, usually within 6 hours, within 5 hours, within 3 hours, or within 1 hour after being reconstituted. In an alternative embodiment, an agent of the invention is supplied in liquid form in a hermetically sealed container indicating the quantity and concentration of agent or active agent. Typically, the liquid form of the agent is supplied in a hermetically sealed container at least 1 mg/ml, at least 2.5 mg/ml, at least 5 mg/ml, at least 8 mg/ml, at least 10 mg/ml, at least 15 mg/kg, or at least 25 mg/ml.

[0367] The invention further provides a pharmaceutical pack or kit comprising one or more containers filled with one or more of the agents of the invention. Additionally, one or more other prophylactic or therapeutic agents useful for the treatment of the target disease or disorder can also be included in the pharmaceutical pack or kit. The invention also provides a pharmaceutical pack or kit comprising one or more containers filled with one or more of the ingredients of the pharmaceutical compositions of the invention. Optionally associated with such container(s) can be a notice in the form prescribed by a governmental agency regulating the manufacture, use or sale of pharmaceuticals or biological products, which notice reflects approval by the agency of manufacture, use, or sale for human administration.

[0368] Generally, the ingredients of compositions of the invention are supplied either separately or mixed together in unit dosage form, for example, as a dry lyophilized powder or water-free concentrate in a hermetically sealed container such as an ampoule or sachette indicating the quantity of agent or active agent. Where the composition is to be administered by infusion, it can be dispensed with an infusion bottle containing sterile pharmaceutical grade water or saline. Where the composition is administered by injection, an ampoule of sterile water for injection or saline can be provided so that the ingredients may be mixed prior to administration.

### 6. EXAMPLES

### 6.1. Example 1—Construction of Expression Cassettes

### 6.1.1. Tau-Specific Full-Length mAb Transgenes

[0369] FIGS. 1B and 1C depict various arrangements of expression cassettes for use with any mAb or mAb fragment transgene described herein. Full-length vectorized IgG antibody gene cassettes (nucleotide sequences encoding the antibodies listed in Table 5) were cloned into AAV proviral plasmids using standard restriction enzyme and T4 ligation based cloning methods. Specifically, proviral plasmids containing the AAV cassette were digested with EcoRI and XhoI restriction enzymes. Coding sequences for each vectorized antibody were digested with these same restriction enzymes to produce sticky ends for ligation into the AAV cassette using T4 DNA ligase. The cassettes carry both a heavy chain and light chain gene that following expression of the heavy chain and light chain polypeptides will heterodimerize to form a full antibody quadroma. The following is a description of each construct:

43A11 IgG2a (plasmid pAAV.CAG.chim.tau.43a11):

[0370] This cassette encodes an isotype control full-length antibody (43a11) used in studies as a comparator. The variable regions of control antibody 43a11 do not recognize a specific antigen. This construct contains conserved regions including the mouse IgG2a constant region and kappa light chain constant region. The transgene is driven by a CAG promoter.

4P3 IgG2a (plasmid pAAV.CAG.chim.tau.4P3):

[0371] This cassette encodes a chimeric human/mouse full-length antibody 4.P3. The variable regions recognize human tau at 217-TPPTREPKKVA-227 (SEQ ID NO: 120) and 249-PMPDLKN-255 (SEQ ID NO: 121). Conserved regions include the mouse IgG2a and kappa light chain. The transgene is driven by a CAG promoter.

4P3 IgG2a LALAPG (plasmid pAAV.CAG.chim.tau.4P3.LALAPGmut):

[0372] This cassette encodes a chimeric human/mouse full-length antibody 4.P3. The variable regions recognize human tau at 217-TPPTREPKKVA-227 and 249-PMPDLKN-255. Conserved regions include the mouse IgG2a and kappa light chain. The IgG2a sequence contains amino acid substitutions at positions 234, 235 and 329 that ablate antibody effector functions. The transgene is driven by a CAG promoter.

31B6 IgG2a (plasmid pAAV.CAG.chim.tau.31.B6):

[0373] This cassette encodes a chimeric human/mouse full-length antibody 31.B6. The variable regions recognize human tau at phosphorylated residues pS202/pT205. Conserved regions include the mouse IgG2a and lambda light chain. The transgene is driven by a CAG promoter.

31B6 IgG2a LALAPG (plasmid pAAV.CAG.chim.tau.31B6.LALAPGmut):

[0374] This cassette encodes a chimeric human/mouse full-length antibody 31.B6. The variable regions recognize human tau at phosphorylated residues pS202/pT205. Conserved regions include the mouse IgG2a and lambda light chain. The IgG2a sequence contains amino acid substitutions at positions 234, 235 and 329 that ablate antibody effector functions. The transgene is driven by a CAG promoter.

8H1 IgG2a (plasmid pAAV.CAG.chim.tau.8H1):

[0375] This cassette encodes a chimeric human/mouse full-length antibody 8.H1. The variable regions recognize phosphorylated human tau at positions pT212/pS214. Conserved regions include the mouse IgG2a and kappa light chain. The transgene is driven by a CAG promoter.

8H1 IgG2a LALAPG (plasmid pAAV.CAG.chim.tau.8H1.LALAPGmut):

[0376] This cassette encodes a chimeric human/mouse full-length antibody 8.H1. The variable regions recognize phosphorylated human tau at positions pT212/pS214. Conserved regions include the mouse IgG2a and kappa light chain. The IgG2a sequence contains amino acid substitutions at positions 234, 235 and 329 that ablate antibody effector functions. The transgene is driven by a CAG promoter.

4P3 IgG1 (plasmid pAAV.CAG.hu.tau.4p3):

[0377] This cassette encodes a fully human full-length antibody 4.P3. The variable regions recognize human tau at 217-TPPTREPKKVA-227 and 249-PMPDLKN-255. Conserved regions include the human IgG1 and kappa light chain. The transgene is driven by a CAG promoter.

31B6 IgG1 (plasmid pAAV.CAG.hu.tau.31b6):

[0378] This cassette encodes a fully human full-length antibody 31.B6. The variable regions recognize human tau at phosphorylated residues pS202/pT205. Conserved regions include the human IgG1 and lambda light chain. The transgene is driven by a CAG promoter.

8H1 IgG1 (plasmid pAAV.CAG.hu.tau.8h1):

[0379] This cassette encodes a fully human full-length antibody 8.H1. The variable regions recognize phosphorylated human tau at positions pT212/p S214. Conserved regions include the human IgG1 and kappa light chain. The transgene is driven by a CAG promoter.

### 6.1.2. Tau-Specific Single Chain mAb Transgenes

[0380] Nucleic acid sequences encoding ScFv and ScFv-Fc constructs (single-chain Fv polypeptides contiguous with an Fc domain) were prepared analogously and expressed from Cis plasmids.

TABLE 11A
ScFv and ScFv-Fc transgene Component Amino Acid Sequences

| | SEQ | |
|---|---|---|
| Name | ID NO: | Amino Acid Sequence |
| 4P3 VH | 97 | EVQLVQSGAEVKKPGESLKISCKVSGYDFSKYWIGWVRQMPGKGLEWMGLI |
| | | YPGDSDTRYSPSLEGQVSISADKSISAAYLQFSSLKASDSAMYYCVRKGYS |
| | | AYLGGWFDPWGQGTLVTVSS |
| 4P3 VL | 98 | DIQLTQSPDSLAASLGERVTINCRSSQNIFYNSNNKNFLAWYQQKAGQSPK |
| | | LLIYWASTRESGVPDRFSGSGSGTDFTLTISGLQAGDVAVYFCQQYFTDAP |
| | | TFGGGTKVEIK |
| 31B6 VH | 99 | EVQLLQSGGGVVQPGGSLRLSCEASGFTFSSYSMHWVRQAPGKGLEWLTLI |
| | | SYNGVNKYYAKSVKGRFAISRDDSKSTLFLQMNSLTTDDTAVYYCARCPIP |
| | | RAASYRNGDNYFEFGQGTLVTVSS |
| 31B6 VL | 100 | QAVVTQEPSLSVSPGGTVTLTCALSSASVSTSSYPSWYQQTPGQPPRMLIH |
| | | NTDTRSSGVPDRFSGSILGKKAALTITGAQADDESDYYCVVYLGNGFWVFG |
| | | GGTKLTVL |
| 8H1 VH | 101 | EVQLVESGGGLVQPGGSLRLSCAASGFTFSIYTMSWVRQAPGKGLEWVSAI |
| | | LSDGSTYYADSVEGRFTISRDNSKTTLYLQMNSLTAEDTAVYYCTKRVEGS |
| | | FRGWGQGTLVTVSS |
| 8H1 VL | 102 | EIVMTQSPGTLSLSPGESATLSCRASQSVSTTYLAWYQQKPGQAPRLLIYG |
| | | ASSRATGIPDRFSGSGSGTDFTLTISRLEPEDFAVYYCQQYGGSRLITFGQ |
| | | GTRLEIK |
| 4GS2 | 226 | GGGGSGGGGS |
| 4GS3 | 227 | GGGGSGGGGSGGGGS |
| 4GS4 | 228 | GGGGSGGGGSGGGGSGGGGS |
| IgG2a Hinge | 229 | EPRGPTIKPCPPCKCP |
| 5G Modified | 230 | GGGGGEPRGPTIKPCPPCKCP |
| IgG2a Hinge | | |
| 9G Modified | 231 | GGGGGGGGGEPRGPTIKPCPPCKCP |
| IgG2a Hinge | | |
| IgG2a | 232 | APNLLGGPSVFIFPPKIKDVLMISLSPIVTCVVVDVSEDDPDVQISWFVNN |
| CH2/CH3 | | VEVHTAQTQTHREDYNSTLRVVSALPIQHQDWMSGKEFKCKVNNKDLPAPI |
| (IgG2a Fc) | | ERTISKPKGSVRAPQVYVLPPPEEEMTKKQVTLTCMVTDEMPEDIYVEWTN |
| | | NGKTELNYKNTEPVLDSDGSYFMYSKLRVEKKNWVERNSYSCSVVHEGLHN |
| | | HHTTKSFSRTPGK |
| | | Lower hinge is shown in italic. |
| IgG2a | 233 | APNAAGGPSVFIFPPKIKDVLMISLSPIVTCVVVDVSEDDPDVQISWFVNN |
| CH2/CH3- | | VEVHTAQTQTHREDYNSTLRVVSALPIQHQDWMSGKEFKCKVNNKDLGAPI |
| LALAPG | | ERTISKPKGSVRAPQVYVLPPPEEEMTKKQVTLTCMVTDEMPEDIYVEWTN |
| (IgG2a Fc- | | NGKTELNYKNTEPVLDSDGSYFMYSKLRVEKKNWVERNSYSCSVVHEGLHN |
| LALAPG) | | HHTTKSFSRTPGK |
| | | Lower hinge is shown in italic. LALA-PG is shown in bold. |

[0381] Component parts listed in Table 6 and Table 11A were arranged to construct various ScFv-Fc polypeptides, the amino acid sequences of which are provided in Table 11B and exemplary nucleotide sequences encoding certain components are provided in Table 11D. Nucleic acid sequences encoding the ScFv-Fc polypeptides of Table 11E were cloned into Cis plasmids for testing and for making rAAV. Exemplary nucleotide sequences encoding the ScFv-Fc polypeptides are provided below in Table 11E.

TABLE 11B
ScFv-Fc Amino Acid Sequences

| | ScFv-Fc | | | | IgG hinge or | |
|---|---|---|---|---|---|---|
| ScFv-Fc | SEQ ID | | Linker | | Glycine Modified | IgG |
| Name | NO: | VH or VL | (4GS)ₓ | VL or VH | IgG hinge | CH2/CH3 |
| 4P3- | 234 | 4P3 VH | 4GS2 | 4P3 VL | IgG2a Hinge | IgG2a |
| VH2VL- | | | | | | |
| IgG2a | EVQLVQSGAEVKKPGESLKISCKVSGYDFSKYWIGWVRQMPGKGLEWMGLIYPGDSDTRYSP | | | | | |
| | SLEGQVSISADKSISAAYLQFSSLKASDSAMYYCVRKGYSAYLGGWFDPWGQGTLVTVSSGG | | | | | |
| | GGSGGGGSDIQLTQSPDSLAASLGERVTINCRSSQNIFYNSNNKNFLAWYQQKAGQSPKLLI | | | | | |
| | YWASTRESGVPDRFSGSGSGTDFTLTISGLQAGDVAVYFCQQYFTDAPTFGGGTKVEIKEPR | | | | | |
| | GPTIKPCPPCKCPAPNLLGGPSVFIFPPKIKDVLMISLSPIVTCVVVDVSEDDPDVQISWFV | | | | | |
| | NNVEVHTAQTQTHREDYNSTLRVVSALPIQHQDWMSGKEFKCKVNNKDLPAPIERTISKPKG | | | | | |
| | SVRAPQVYVLPPPEEEMTKKQVTLTCMVTDFMPEDIYVEWTNNGKTELNYKNTEPVLDSDGS | | | | | |
| | YFMYSKLRVEKKNWVERNSYSCSVVHEGLHNHHTTKSFSRTPGK | | | | | |
| 4P3- | 235 | 4P3 VH | 4GS2 | 4P3 VL | IgG4 Hinge | IgG4 |
| VH2VL- | EVQLVQSGAEVKKPGESLKISCKVSGYDFSKYWIGWVRQMPGKGLEWMGLIYPGDSDTRYSP | | | | | |
| IgG4 | SLEGQVSISADKSISAAYLQFSSLKASDSAMYYCVRKGYSAYLGGWFDPWGQGTLVTVSSGG | | | | | |
| | GGSGGGGSDIQLTQSPDSLAASLGERVTINCRSSQNIFYNSNNKNFLAWYQQKAGQSPKLLI | | | | | |
| | YWASTRESGVPDRFSGSGSGTDFTLTISGLQAGDVAVYFCQQYFTDAPTFGGGTKVEIKESK | | | | | |
| | YGPPCPSCPAPEFLGGPSVFLFPPKPKDTLMISRTPEVTCVVVDVSQEDPEVQFNWYVDGVE | | | | | |
| | VHNAKTKPREEQFNSTYRVVSVLTVLHQDWLNGKEYKCKVSNKGLPSSIEKTISKAKGQPRE | | | | | |
| | PQVYTLPPSQEEMTKNQVSLTCLVKGFYPSDIAVEWESNGQPENNYKTTPPVLDSDGSFFLY | | | | | |
| | SRLTVDKSRWQEGNVFSCSVMHEALHNHYTQKSLSLSLGK | | | | | |
| 4P3- | 236 | 4P3 VH | 4GS2 | 4P3 VL | 5G Modified IgG2a | IgG2a |
| VH2VL- | | | | | Hinge | |
| 5GIgG2a | EVQLVQSGAEVKKPGESLKISCKVSGYDFSKYWIGWVRQMPGKGLEWMGLIYPGDSDTRYSP | | | | | |
| | SLEGQVSISADKSISAAYLQFSSLKASDSAMYYCVRKGYSAYLGGWFDPWGQGTLVTVSSGG | | | | | |
| | GGSGGGGSDIQLTQSPDSLAASLGERVTINCRSSQNIFYNSNNKNFLAWYQQKAGQSPKLLI | | | | | |
| | YWASTRESGVPDRFSGSGSGTDFTLTISGLQAGDVAVYFCQQYFTDAPTFGGGTKVEIKGGG | | | | | |
| | GGEPRGPTIKPCPPCKCPAPNLLGGPSVFIFPPKIKDVLMISLSPIVTCVVVDVSEDDPDVQ | | | | | |
| | ISWFVNNVEVHTAQTQTHREDYNSTLRVVSALPIQHQDWMSGKEFKCKVNNKDLPAPIERTI | | | | | |
| | SKPKGSVRAPQVYVLPPPEEEMTKKQVTLTCMVTDEMPEDIYVEWTNNGKTELNYKNTEPVL | | | | | |
| | DSDGSYFMYSKLRVEKKNWVERNSYSCSVVHEGLHNHHTTKSFSRTPGK | | | | | |
| 4P3- | 237 | 4P3 VH | 4GS2 | 4P3 VL | 5G Modified IgG4 | IgG4 |
| VH2VL- | | | | | Hinge | |
| IgG4 | EVQLVQSGAEVKKPGESLKISCKVSGYDFSKYWIGWVRQMPGKGLEWMGLIYPGDSDTRYSP | | | | | |
| | SLEGQVSISADKSISAAYLQFSSLKASDSAMYYCVRKGYSAYLGGWFDPWGQGTLVTVSSGG | | | | | |
| | GGSGGGGSDIQLTQSPDSLAASLGERVTINCRSSQNIFYNSNNKNFLAWYQQKAGQSPKLLI | | | | | |
| | YWASTRESGVPDRFSGSGSGTDFTLTISGLQAGDVAVYFCQQYFTDAPTFGGGTKVEIKGGG | | | | | |
| | GGESKYGPPCPSCPAPEFLGGPSVFLFPPKPKDTLMISRTPEVTCVVVDVSQEDPEVQFNWY | | | | | |
| | VDGVEVHNAKTKPREEQFNSTYRVVSVLTVLHQDWLNGKEYKCKVSNKGLPSSIEKTISKAK | | | | | |
| | GQPREPQVYTLPPSQEEMTKNQVSLTCLVKGFYPSDIAVEWESNGQPENNYKTTPPVLDSDG | | | | | |
| | SFFLYSRLTVDKSRWQEGNVFSCSVMHEALHNHYTQKSLSLSLGK | | | | | |
| 4P3- | 238 | 4P3 VH | 4GS2 | 4P3 VL | 9G Modified IgG2a | IgG2a |
| VH2VL- | | | | | Hinge | |
| 9GIgG2a | EVQLVQSGAEVKKPGESLKISCKVSGYDFSKYWIGWVRQMPGKGLEWMGLIYPGDSDTRYSP | | | | | |
| | SLEGQVSISADKSISAAYLQFSSLKASDSAMYYCVRKGYSAYLGGWFDPWGQGTLVTVSSGG | | | | | |
| | GGSGGGGSDIQLTQSPDSLAASLGERVTINCRSSQNIFYNSNNKNFLAWYQQKAGQSPKLLI | | | | | |
| | YWASTRESGVPDRFSGSGSGTDFTLTISGLQAGDVAVYFCQQYFTDAPTFGGGTKVEIKGGG | | | | | |
| | GGGGGGEPRGPTIKPCPPCKCPAPNLLGGPSVFIFPPKIKDVLMISLSPIVTCVVVDVSEDD | | | | | |
| | PDVQISWFVNNVEVHTAQTQTHREDYNSTLRVVSALPIQHQDWMSGKEFKCKVNNKDLPAPI | | | | | |
| | ERTISKPKGSVRAPQVYVLPPPEEEMTKKQVTLTCMVTDFMPEDIYVEWTNNGKTELNYKNT | | | | | |
| | EPVLDSDGSYFMYSKLRVEKKNWVERNSYSCSVVHEGLHNHHTTKSFSRTPGK | | | | | |
| 4P3- | 239 | 4P3 VH | 4GS2 | 4P3 VL | 9G Modified IgG4 | IgG4 |
| VH2VL- | | | | | Hinge | |
| 9GIgG4 | EVQLVQSGAEVKKPGESLKISCKVSGYDESKYWIGWVRQMPGKGLEWMGLIYPGDSDTRYSP | | | | | |
| | SLEGQVSISADKSISAAYLQFSSLKASDSAMYYCVRKGYSAYLGGWFDPWGQGTLVTVSSGG | | | | | |
| | GGSGGGGSDIQLTQSPDSLAASLGERVTINCRSSQNIFYNSNNKNFLAWYQQKAGQSPKLLI | | | | | |
| | YWASTRESGVPDRFSGSGSGTDFTLTISGLQAGDVAVYFCQQYFTDAPTFGGGTKVEIKGGG | | | | | |
| | GGGGGGESKYGPPCPSCPAPEFLGGPSVFLFPPKPKDTLMISRTPEVTCVVVDVSQEDPEVQ | | | | | |
| | FNWYVDGVEVHNAKTKPREEQFNSTYRVVSVLTVLHQDWLNGKEYKCKVSNKGLPSSIEKTI | | | | | |
| | SKAKGQPREPQVYTLPPSQEEMTKNQVSLTCLVKGFYPSDIAVEWESNGQPENNYKTTPPVL | | | | | |
| | DSDGSFFLYSRLTVDKSRWQEGNVFSCSVMHEALHNHYTQKSLSLSLGK | | | | | |
| 4P3- | 240 | 4P3 VH | 4GS3 | 4P3 VL | IgG2a Hinge | IgG2a |
| VH3VL- | EVQLVQSGAEVKKPGESLKISCKVSGYDFSKYWIGWVRQMPGKGLEWMGLIYPGDSDTRYSP | | | | | |
| IgG2a | SLEGQVSISADKSISAAYLQFSSLKASDSAMYYCVRKGYSAYLGGWFDPWGQGTLVTVSSGG | | | | | |
| | GGSGGGGSGGGGSDIQLTQSPDSLAASLGERVTINCRSSQNIFYNSNNKNFLAWYQQKAGQS | | | | | |
| | PKLLIYWASTRESGVPDRFSGSGSGTDFTLTISGLQAGDVAVYFCQQYFTDAPTFGGGTKVE | | | | | |
| | IKEPRGPTIKPCPPCKCPAPNLLGGPSVFIFPPKIKDVLMISLSPIVTCVVVDVSEDDPDVQ | | | | | |
| | ISWFVNNVEVHTAQTQTHREDYNSTLRVVSALPIQHQDWMSGKEFKCKVNNKDLPAPIERTI | | | | | |
| | SKPKGSVRAPQVYVLPPPEEEMTKKQVTLTCMVTDEMPEDIYVEWTNNGKTELNYKNTEPVL | | | | | |
| | DSDGSYFMYSKLRVEKKNWVERNSYSCSVVHEGLHNHHTTKSFSRTPGK | | | | | |
| 4P3- | 241 | 4P3 VH | 4GS3 | 4P3 VL | 5G Modified IgG2a | IgG2a |
| VH3VL- | | | | | Hinge | |
| 5GIgG2a | EVQLVQSGAEVKKPGESLKISCKVSGYDFSKYWIGWVRQMPGKGLEWMGLIYPGDSDTRYSP | | | | | |
| | SLEGQVSISADKSISAAYLQFSSLKASDSAMYYCVRKGYSAYLGGWFDPWGQGTLVTVSSGG | | | | | |
| | GGSGGGGSGGGGSDIQLTQSPDSLAASLGERVTINCRSSQNIFYNSNNKNFLAWYQQKAGQS | | | | | |
| | PKLLIYWASTRESGVPDRFSGSGSGTDFTLTISGLQAGDVAVYFCQQYFTDAPTFGGGTKVE | | | | | |
| | IKGGGGGEPRGPTIKPCPPCKCPAPNLLGGPSVFIFPPKIKDVLMISLSPIVTCVVVDVSED | | | | | |
| | DPDVQISWFVNNVEVHTAQTQTHREDYNSTLRVVSALPIQHQDWMSGKEFKCKVNNKDLPAP | | | | | |
| | IERTISKPKGSVRAPQVYVLPPPEEEMTKKQVTLTCMVTDEMPEDIYVEWTNNGKTELNYKN | | | | | |
| | TEPVLDSDGSYFMYSKLRVEKKNWVERNSYSCSVVHEGLHNHHTTKSFSRTPGK | | | | | |
| 4P3- | 242 | 4P3 VH | 4GS3 | 4P3 VL | 9G Modified IgG2a | IgG2a |
| VH3VL- | | | | | Hinge | |
| 9GIgG2a | EVQLVQSGAEVKKPGESLKISCKVSGYDFSKYWIGWVRQMPGKGLEWMGLIYPGDSDTRYSP | | | | | |
| | SLEGQVSISADKSISAAYLQFSSLKASDSAMYYCVRKGYSAYLGGWFDPWGQGTLVTVSSGG | | | | | |
| | GGSGGGGSGGGGSDIQLTQSPDSLAASLGERVTINCRSSQNIFYNSNNKNFLAWYQQKAGQS | | | | | |
| | PKLLIYWASTRESGVPDRFSGSGSGTDFTLTISGLQAGDVAVYFCQQYFTDAPTFGGGTKVE | | | | | |
| | IKGGGGGGGGGEPRGPTIKPCPPCKCPAPNLLGGPSVFIFPPKIKDVLMISLSPIVTCVVVD | | | | | |
| | VSEDDPDVQISWFVNNVEVHTAQTQTHREDYNSTLRVVSALPIQHQDWMSGKEFKCKVNNKD | | | | | |
| | LPAPIERTISKPKGSVRAPQVYVLPPPEEEMTKKQVTLTCMVTDFMPEDIYVEWTNNGKTEL | | | | | |
| | NYKNTEPVLDSDGSYFMYSKLRVEKKNWVERNSYSCSVVHEGLHNHHTTKSFSRTPGK | | | | | |
| 4P3- | 243 | 4P3 VH | 4GS4 | 4P3 VL | IgG2a Hinge | IgG2a |
| VH4VL- | EVQLVQSGAEVKKPGESLKISCKVSGYDFSKYWIGWVRQMPGKGLEWMGLIYPGDSDTRYSP | | | | | |
| IgG2a | SLEGQVSISADKSISAAYLQFSSLKASDSAMYYCVRKGYSAYLGGWFDPWGQGTLVTVSSGG | | | | | |
| | GGSGGGGSGGGGSGGGGSDIQLTQSPDSLAASLGERVTINCRSSQNIFYNSNNKNFLAWYQQ | | | | | |
| | KAGQSPKLLIYWASTRESGVPDRFSGSGSGTDFTLTISGLQAGDVAVYFCQQYFTDAPTFGG | | | | | |
| | GTKVEIKEPRGPTIKPCPPCKCPAPNLLGGPSVFIFPPKIKDVLMISLSPIVTCVVVDVSED | | | | | |
| | DPDVQISWFVNNVEVHTAQTQTHREDYNSTLRVVSALPIQHQDWMSGKEFKCKVNNKDLPAP | | | | | |
| | IERTISKPKGSVRAPQVYVLPPPEEEMTKKQVTLTCMVTDEMPEDIYVEWTNNGKTELNYKN | | | | | |
| | TEPVLDSDGSYFMYSKLRVEKKNWVERNSYSCSVVHEGLHNHHTTKSFSRTPGK | | | | | |
| 4P3- | 244 | 4P3 VH | 4GS4 | 4P3 VL | 5G Modified IgG2a | IgG2a |
| VH4VL- | | | | | Hinge | |
| 5GIgG2a | EVQLVQSGAEVKKPGESLKISCKVSGYDESKYWIGWVRQMPGKGLEWMGLIYPGDSDTRYSP | | | | | |
| | SLEGQVSISADKSISAAYLQFSSLKASDSAMYYCVRKGYSAYLGGWFDPWGQGTLVTVSSGG | | | | | |
| | GGSGGGGSGGGGSGGGGSDIQLTQSPDSLAASLGERVTINCRSSQNIFYNSNNKNFLAWYQQ | | | | | |
| | KAGQSPKLLIYWASTRESGVPDRFSGSGSGTDFTLTISGLQAGDVAVYFCQQYFTDAPTFGG | | | | | |
| | GTKVEIKGGGGGEPRGPTIKPCPPCKCPAPNLLGGPSVFIFPPKIKDVLMISLSPIVTCVVV | | | | | |
| | DVSEDDPDVQISWFVNNVEVHTAQTQTHREDYNSTLRVVSALPIQHQDWMSGKEFKCKVNNK | | | | | |
| | DLPAPIERTISKPKGSVRAPQVYVLPPPEEEMTKKQVTLTCMVTDEMPEDIYVEWTNNGKTE | | | | | |
| | LNYKNTEPVLDSDGSYFMYSKLRVEKKNWVERNSYSCSVVHEGLHNHHTTKSFSRTPGK | | | | | |
| 4P3- | 245 | 4P3 VH | 4GS4 | 4P3 VL | 9G Modified IgG2a | IgG2a |
| VH4VL- | | | | | Hinge | |
| 9GIgG2a | EVQLVQSGAEVKKPGESLKISCKVSGYDFSKYWIGWVRQMPGKGLEWMGLIYPGDSDTRYSP | | | | | |
| | SLEGQVSISADKSISAAYLQFSSLKASDSAMYYCVRKGYSAYLGGWFDPWGQGTLVTVSSGG | | | | | |
| | GGSGGGGSGGGGSGGGGSDIQLTQSPDSLAASLGERVTINCRSSQNIFYNSNNKNFLAWYQQ | | | | | |
| | KAGQSPKLLIYWASTRESGVPDRFSGSGSGTDFTLTISGLQAGDVAVYFCQQYFTDAPTFGG | | | | | |
| | GTKVEIKGGGGGGGGGEPRGPTIKPCPPCKCPAPNLLGGPSVFIFPPKIKDVLMISLSPIVT | | | | | |
| | CVVVDVSEDDPDVQISWFVNNVEVHTAQTQTHREDYNSTLRVVSALPIQHQDWMSGKEFKCK | | | | | |
| | VNNKDLPAPIERTISKPKGSVRAPQVYVLPPPEEEMTKKQVTLTCMVTDEMPEDIYVEWINN | | | | | |
| | GKTELNYKNTEPVLDSDGSYFMYSKLRVEKKNWVERNSYSCSVVHEGLHNHHTTKSFSRTPG | | | | | |
| | K | | | | | |
| 4P3- | 246 | 4P3 VL | 4GS2 | 4P3 VH | IgG2a Hinge | IgG2a |
| VL2VH- | DIQLTQSPDSLAASLGERVTINCRSSQNIFYNSNNKNFLAWYQQKAGQSPKLLIYWASTRES | | | | | |
| IgG2a | GVPDRFSGSGSGTDFTLTISGLQAGDVAVYFCQQYFTDAPTFGGGTKVEIKGGGGSGGGGSD | | | | | |
| | IQLTQSPDSLAASLGERVTINCRSSQNIFYNSNNKNFLAWYQQKAGQSPKLLIYWASTRESG | | | | | |
| | VPDRFSGSGSGTDFTLTISGLQAGDVAVYFCQQYFTDAPTFGGGTKVEIKEPRGPTIKPCPP | | | | | |
| | CKCPAPNLLGGPSVFIFPPKIKDVLMISLSPIVTCVVVDVSEDDPDVQISWFVNNVEVHTAQ | | | | | |
| | TQTHREDYNSTLRVVSALPIQHQDWMSGKEFKCKVNNKDLPAPIERTISKPKGSVRAPQVYV | | | | | |
| | LPPPEEEMTKKQVTLTCMVTDEMPEDIYVEWTNNGKTELNYKNTEPVLDSDGSYFMYSKLRV | | | | | |
| | EKKNWVERNSYSCSVVHEGLHNHHTTKSFSRTPGK | | | | | |
| 4P3- | 247 | 4P3 VL | 4GS2 | 4P3 VH | 5G Modified IgG2a | IgG2a |
| VL2VH- | | | | | Hinge | |
| 5GIgG2a | DIQLTQSPDSLAASLGERVTINCRSSQNIFYNSNNKNFLAWYQQKAGQSPKLLIYWASTRES | | | | | |
| | GVPDRFSGSGSGTDFTLTISGLQAGDVAVYFCQQYFTDAPTFGGGTKVEIKGGGGSGGGGSD | | | | | |
| | IQLTQSPDSLAASLGERVTINCRSSQNIFYNSNNKNFLAWYQQKAGQSPKLLIYWASTRESG | | | | | |
| | VPDRFSGSGSGTDFTLTISGLQAGDVAVYFCQQYFTDAPTFGGGTKVEIKGGGGGEPRGPTI | | | | | |
| | KPCPPCKCPAPNLLGGPSVFIFPPKIKDVLMISLSPIVTCVVVDVSEDDPDVQISWFVNNVE | | | | | |
| | VHTAQTQTHREDYNSTLRVVSALPIQHQDWMSGKEFKCKVNNKDLPAPIERTISKPKGSVRA | | | | | |
| | PQVYVLPPPEEEMTKKQVTLTCMVTDFMPEDIYVEWTNNGKTELNYKNTEPVLDSDGSYFMY | | | | | |
| | SKLRVEKKNWVERNSYSCSVVHEGLHNHHTTKSFSRTPGK | | | | | |
| 4P3- | 248 | 4P3 VL | 4GS2 | 4P3 VH | 9G Modified IgG2a | IgG2a |
| VL2VH- | | | | | Hinge | |
| 9GIgG2a | DIQLTQSPDSLAASLGERVTINCRSSQNIFYNSNNKNFLAWYQQKAGQSPKLLIYWASTRES | | | | | |
| | GVPDRFSGSGSGTDFTLTISGLQAGDVAVYFCQQYFTDAPTFGGGTKVEIKGGGGSGGGGSD | | | | | |
| | IQLTQSPDSLAASLGERVTINCRSSQNIFYNSNNKNFLAWYQQKAGQSPKLLIYWASTRESG | | | | | |
| | VPDRFSGSGSGTDFTLTISGLQAGDVAVYFCQQYFTDAPTFGGGTKVEIKGGGGGGGGGEPR | | | | | |
| | GPTIKPCPPCKCPAPNLLGGPSVFIFPPKIKDVLMISLSPIVTCVVVDVSEDDPDVQISWFV | | | | | |
| | NNVEVHTAQTQTHREDYNSTLRVVSALPIQHQDWMSGKEFKCKVNNKDLPAPIERTISKPKG | | | | | |
| | SVRAPQVYVLPPPEEEMTKKQVTLTCMVTDEMPEDIYVEWTNNGKTELNYKNTEPVLDSDGS | | | | | |
| | YFMYSKLRVEKKNWVERNSYSCSVVHEGLHNHHTTKSFSRTPGK | | | | | |
| 4P3- | 249 | 4P3 VL | 4GS3 | 4P3 VH | IgG2a Hinge | IgG2a |
| VL3VH- | DIQLTQSPDSLAASLGERVTINCRSSQNIFYNSNNKNFLAWYQQKAGQSPKLLIYWASTRES | | | | | |
| IgG2a | GVPDRFSGSGSGTDFTLTISGLQAGDVAVYFCQQYFTDAPTFGGGTKVEIKGGGGSGGGGSG | | | | | |
| | GGGSDIQLTQSPDSLAASLGERVTINCRSSQNIFYNSNNKNFLAWYQQKAGQSPKLLIYWAS | | | | | |
| | TRESGVPDRFSGSGSGTDFTLTISGLQAGDVAVYFCQQYFTDAPTFGGGTKVEIKEPRGPTI | | | | | |
| | KPCPPCKCPAPNLLGGPSVFIFPPKIKDVLMISLSPIVTCVVVDVSEDDPDVQISWFVNNVE | | | | | |
| | VHTAQTQTHREDYNSTLRVVSALPIQHQDWMSGKEFKCKVNNKDLPAPIERTISKPKGSVRA | | | | | |
| | PQVYVLPPPEEEMTKKQVTLTCMVTDFMPEDIYVEWTNNGKTELNYKNTEPVLDSDGSYFMY | | | | | |
| | SKLRVEKKNWVERNSYSCSVVHEGLHNHHTTKSFSRTPGK | | | | | |
| 4P3- | 250 | 4P3 VL | 4GS3 | 4P3 VH | 5G Modified IgG2a | IgG2a |
| VL3 VH- | | | | | Hinge | |
| 5GIgG2a | DIQLTQSPDSLAASLGERVTINCRSSQNIFYNSNNKNFLAWYQQKAGQSPKLLIYWASTRES | | | | | |
| | GVPDRFSGSGSGTDFTLTISGLQAGDVAVYFCQQYFTDAPTFGGGTKVEIKGGGGSGGGGSG | | | | | |
| | GGGSDIQLTQSPDSLAASLGERVTINCRSSQNIFYNSNNKNFLAWYQQKAGQSPKLLIYWAS | | | | | |
| | TRESGVPDRFSGSGSGTDFTLTISGLQAGDVAVYFCQQYFTDAPTFGGGTKVEIKGGGGGEP | | | | | |
| | RGPTIKPCPPCKCPAPNLLGGPSVFIFPPKIKDVLMISLSPIVTCVVVDVSEDDPDVQISWE | | | | | |
| | VNNVEVHTAQTQTHREDYNSTLRVVSALPIQHQDWMSGKEFKCKVNNKDLPAPIERTISKPK | | | | | |
| | GSVRAPQVYVLPPPEEEMTKKQVTLTCMVTDFMPEDIYVEWTNNGKTELNYKNTEPVLDSDG | | | | | |
| | SYFMYSKLRVEKKNWVERNSYSCSVVHEGLHNHHTTKSFSRTPGK | | | | | |
| 4P3- | 251 | 4P3 VL | 4GS3 | 4P3 VH | 9G Modified IgG2a | IgG2a |
| VL3 VH- | | | | | Hinge | |
| 9GIgG2a | DIQLTQSPDSLAASLGERVTINCRSSQNIFYNSNNKNFLAWYQQKAGQSPKLLIYWASTRES | | | | | |
| | GVPDRFSGSGSGTDFTLTISGLQAGDVAVYFCQQYFTDAPTFGGGTKVEIKGGGGSGGGGSG | | | | | |
| | GGGSDIQLTQSPDSLAASLGERVTINCRSSQNIFYNSNNKNFLAWYQQKAGQSPKLLIYWAS | | | | | |
| | TRESGVPDRFSGSGSGTDFTLTISGLQAGDVAVYFCQQYFTDAPTFGGGTKVEIKGGGGGGG | | | | | |
| | GGEPRGPTIKPCPPCKCPAPNLLGGPSVFIFPPKIKDVLMISLSPIVTCVVVDVSEDDPDVQ | | | | | |
| | ISWFVNNVEVHTAQTQTHREDYNSTLRVVSALPIQHQDWMSGKEFKCKVNNKDLPAPIERTI | | | | | |
| | SKPKGSVRAPQVYVLPPPEEEMTKKQVTLTCMVTDFMPEDIYVEWTNNGKTELNYKNTEPVL | | | | | |
| | DSDGSYFMYSKLRVEKKNWVERNSYSCSVVHEGLHNHHTTKSFSRTPGK | | | | | |
| 4P3- | 252 | 4P3 VL | 4GS4 | 4P3 VH | IgG2a Hinge | IgG2a |
| VL4VH- | DIQLTQSPDSLAASLGERVTINCRSSQNIFYNSNNKNFLAWYQQKAGQSPKLLIYWASTRES | | | | | |
| IgG2a | GVPDRFSGSGSGTDFTLTISGLQAGDVAVYFCQQYFTDAPTFGGGTKVEIKGGGGSGGGGSG | | | | | |
| | GGGSGGGGSDIQLTQSPDSLAASLGERVTINCRSSQNIFYNSNNKNFLAWYQQKAGQSPKLL | | | | | |
| | IYWASTRESGVPDRFSGSGSGTDFTLTISGLQAGDVAVYFCQQYFTDAPTFGGGTKVEIKEP | | | | | |
| | RGPTIKPCPPCKCPAPNLLGGPSVFIFPPKIKDVLMISLSPIVTCVVVDVSEDDPDVQISWF | | | | | |
| | VNNVEVHTAQTQTHREDYNSTLRVVSALPIQHQDWMSGKEFKCKVNNKDLPAPIERTISKPK | | | | | |
| | GSVRAPQVYVLPPPEEEMTKKQVTLTCMVTDEMPEDIYVEWTNNGKTELNYKNTEPVLDSDG | | | | | |
| | SYFMYSKLRVEKKNWVERNSYSCSVVHEGLHNHHTTKSFSRTPGK | | | | | |
| 4P3- | 253 | 4P3 VL | 4GS4 | 4P3 VH | 5G Modified IgG2a | IgG2a |
| VL4VH- | | | | | Hinge | |
| 5GIgG2a | DIQLTQSPDSLAASLGERVTINCRSSQNIFYNSNNKNFLAWYQQKAGQSPKLLIYWASTRES | | | | | |
| | GVPDRFSGSGSGTDFTLTISGLQAGDVAVYFCQQYFTDAPTFGGGTKVEIKGGGGSGGGGSG | | | | | |
| | GGGSGGGGSDIQLTQSPDSLAASLGERVTINCRSSQNIFYNSNNKNFLAWYQQKAGQSPKLL | | | | | |
| | IYWASTRESGVPDRFSGSGSGTDFTLTISGLQAGDVAVYFCQQYFTDAPTFGGGTKVEIKGG | | | | | |
| | GGGEPRGPTIKPCPPCKCPAPNLLGGPSVFIFPPKIKDVLMISLSPIVTCVVVDVSEDDPDV | | | | | |
| | QISWFVNNVEVHTAQTQTHREDYNSTLRVVSALPIQHQDWMSGKEFKCKVNNKDLPAPIERT | | | | | |
| | ISKPKGSVRAPQVYVLPPPEEEMTKKQVTLTCMVTDFMPEDIYVEWTNNGKTELNYKNTEPV | | | | | |
| | LDSDGSYFMYSKLRVEKKNWVERNSYSCSVVHEGLHNHHTTKSFSRTPGK | | | | | |
| 4P3- | 254 | 4P3 VL | 4GS4 | 4P3 VH | 9G Modified IgG2a | IgG2a |
| VL4VH- | | | | | Hinge | |
| 9GIgG2a | DIQLTQSPDSLAASLGERVTINCRSSQNIFYNSNNKNFLAWYQQKAGQSPKLLIYWASTRES | | | | | |
| | GVPDRFSGSGSGTDFTLTISGLQAGDVAVYFCQQYFTDAPTFGGGTKVEIKGGGGSGGGGSG | | | | | |
| | GGGSGGGGSDIQLTQSPDSLAASLGERVTINCRSSQNIFYNSNNKNFLAWYQQKAGQSPKLL | | | | | |
| | IYWASTRESGVPDRFSGSGSGTDFTLTISGLQAGDVAVYFCQQYFTDAPTFGGGTKVEIKGG | | | | | |
| | GGGGGGGEPRGPTIKPCPPCKCPAPNLLGGPSVFIFPPKIKDVLMISLSPIVTCVVVDVSED | | | | | |
| | DPDVQISWFVNNVEVHTAQTQTHREDYNSTLRVVSALPIQHQDWMSGKEFKCKVNNKDLPAP | | | | | |
| | IERTISKPKGSVRAPQVYVLPPPEEEMTKKQVTLTCMVTDEMPEDIYVEWTNNGKTELNYKN | | | | | |
| | TEPVLDSDGSYFMYSKLRVEKKNWVERNSYSCSVVHEGLHNHHTTKSFSRTPGK | | | | | |
| 31B6- | 255 | 31B6 VH | 4GS2 | 31B6 VL | IgG2a Hinge | IgG2a |
| VH2VL- | EVQLLQSGGGVVQPGGSLRLSCEASGFTESSYSMHWVRQAPGKGLEWLTLISYNGVNKYYAK | | | | | |
| IgG2a | SVKGRFAISRDDSKSTLFLQMNSLTTDDTAVYYCARCPIPRAASYRNGDNYFEFGQGTLVTV | | | | | |
| | SSGGGGSGGGGSQAVVTQEPSLSVSPGGTVTLTCALSSASVSTSSYPSWYQQTPGQPPRMLI | | | | | |
| | HNTDTRSSGVPDRFSGSILGKKAALTITGAQADDESDYYCVVYLGNGFWVFGGGTKLTVLEP | | | | | |
| | RGPTIKPCPPCKCPAPNLLGGPSVFIFPPKIKDVLMISLSPIVTCVVVDVSEDDPDVQISWF | | | | | |
| | VNNVEVHTAQTQTHREDYNSTLRVVSALPIQHQDWMSGKEFKCKVNNKDLPAPIERTISKPK | | | | | |
| | GSVRAPQVYVLPPPEEEMTKKQVTLTCMVTDFMPEDIYVEWTNNGKTELNYKNTEPVLDSDG | | | | | |
| | SYFMYSKLRVEKKNWVERNSYSCSVVHEGLHNHHTTKSFSRTPGK | | | | | |
| 31B6- | 256 | 31B6 VH | 4GS2 | 31B6 VL | IgG4 Hinge | IgG4 |
| VH2VL- | EVQLLQSGGGVVQPGGSLRLSCEASGFTFSSYSMHWVRQAPGKGLEWLTLISYNGVNKYYAK | | | | | |
| IgG4 | SVKGRFAISRDDSKSTLFLQMNSLTTDDTAVYYCARCPIPRAASYRNGDNYFEFGQGTLVTV | | | | | |
| | SSGGGGSGGGGSQAVVTQEPSLSVSPGGTVTLTCALSSASVSTSSYPSWYQQTPGQPPRMLI | | | | | |
| | HNTDTRSSGVPDRFSGSILGKKAALTITGAQADDESDYYCVVYLGNGFWVFGGGTKLTVLES | | | | | |
| | KYGPPCPSCPAPEFLGGPSVFLFPPKPKDTLMISRTPEVTCVVVDVSQEDPEVQFNWYVDGV | | | | | |
| | EVHNAKTKPREEQFNSTYRVVSVLTVLHQDWLNGKEYKCKVSNKGLPSSIEKTISKAKGQPR | | | | | |
| | EPQVYTLPPSQEEMTKNQVSLTCLVKGFYPSDIAVEWESNGQPENNYKTTPPVLDSDGSFFL | | | | | |
| | YSRLTVDKSRWQEGNVFSCSVMHEALHNHYTQKSLSLSLGK | | | | | |
| 31B6- | 257 | 31B6 VH | 4GS2 | 31B6 VL | 5G Modified IgG2a | IgG2a |
| VH2VL- | | | | | Hinge | |
| 5GIgG2a | EVQLLQSGGGVVQPGGSLRLSCEASGFTFSSYSMHWVRQAPGKGLEWLTLISYNGVNKYYAK | | | | | |
| | SVKGRFAISRDDSKSTLFLQMNSLTTDDTAVYYCARCPIPRAASYRNGDNYFEFGQGTLVTV | | | | | |
| | SSGGGGSGGGGSQAVVTQEPSLSVSPGGTVTLTCALSSASVSTSSYPSWYQQTPGQPPRMLI | | | | | |
| | HNTDTRSSGVPDRFSGSILGKKAALTITGAQADDESDYYCVVYLGNGFWVFGGGTKLTVLGG | | | | | |
| | GGGEPRGPTIKPCPPCKCPAPNLLGGPSVFIFPPKIKDVLMISLSPIVTCVVVDVSEDDPDV | | | | | |
| | QISWFVNNVEVHTAQTQTHREDYNSTLRVVSALPIQHQDWMSGKEFKCKVNNKDLPAPIERT | | | | | |
| | ISKPKGSVRAPQVYVLPPPEEEMTKKQVTLTCMVTDEMPEDIYVEWTNNGKTELNYKNTEPV | | | | | |
| | LDSDGSYFMYSKLRVEKKNWVERNSYSCSVVHEGLHNHHTTKSFSRTPGK | | | | | |
| 31B6- | 258 | 31B6 VH | 4GS2 | 31B6 VL | 5G Modified IgG4 | IgG4 |
| VH2VL- | | | | | Hinge | |
| 5GIgG4 | EVQLLQSGGGVVQPGGSLRLSCEASGFTFSSYSMHWVRQAPGKGLEWLTLISYNGVNKYYAK | | | | | |
| | SVKGRFAISRDDSKSTLFLQMNSLTTDDTAVYYCARCPIPRAASYRNGDNYFEFGQGTLVTV | | | | | |
| | SSGGGGSGGGGSQAVVTQEPSLSVSPGGTVTLTCALSSASVSTSSYPSWYQQTPGQPPRMLI | | | | | |
| | HNTDTRSSGVPDRFSGSILGKKAALTITGAQADDESDYYCVVYLGNGFWVFGGGTKLTVLGG | | | | | |
| | GGGESKYGPPCPSCPAPEFLGGPSVFLFPPKPKDTLMISRTPEVTCVVVDVSQEDPEVQFNW | | | | | |
| | YVDGVEVHNAKTKPREEQFNSTYRVVSVLTVLHQDWLNGKEYKCKVSNKGLPSSIEKTISKA | | | | | |
| | KGQPREPQVYTLPPSQEEMTKNQVSLTCLVKGFYPSDIAVEWESNGQPENNYKTTPPVLDSD | | | | | |
| | GSFFLYSRLTVDKSRWQEGNVFSCSVMHEALHNHYTQKSLSLSLGK | | | | | |
| 31B6- | 259 | 31B6 VH | 4GS2 | 31B6 VL | 9G Modified IgG2a | IgG2a |
| VH2VL- | | | | | Hinge | |
| 9GIgG2a | EVQLLQSGGGVVQPGGSLRLSCEASGFTESSYSMHWVRQAPGKGLEWLTLISYNGVNKYYAK | | | | | |
| | SVKGRFAISRDDSKSTLFLQMNSLTTDDTAVYYCARCPIPRAASYRNGDNYFEFGQGTLVTV | | | | | |
| | SSGGGGSGGGGSQAVVTQEPSLSVSPGGTVTLTCALSSASVSTSSYPSWYQQTPGQPPRMLI | | | | | |
| | HNTDTRSSGVPDRFSGSILGKKAALTITGAQADDESDYYCVVYLGNGFWVFGGGTKLTVLGG | | | | | |
| | GGGGGGGEPRGPTIKPCPPCKCPAPNLLGGPSVFIFPPKIKDVLMISLSPIVTCVVVDVSED | | | | | |
| | DPDVQISWFVNNVEVHTAQTQTHREDYNSTLRVVSALPIQHQDWMSGKEFKCKVNNKDLPAP | | | | | |
| | IERTISKPKGSVRAPQVYVLPPPEEEMTKKQVTLTCMVTDFMPEDIYVEWTNNGKTELNYKN | | | | | |
| | TEPVLDSDGSYFMYSKLRVEKKNWVERNSYSCSVVHEGLHNHHTTKSFSRTPGK | | | | | |
| 31B6- | 260 | 31B6 VH | 4GS2 | 31B6 VL | 9G Modified IgG4 | IgG4 |
| VH2VL- | | | | | Hinge | |
| 9GIgG4 | EVQLLQSGGGVVQPGGSLRLSCEASGFTFSSYSMHWVRQAPGKGLEWLTLISYNGVNKYYAK | | | | | |
| | SVKGRFAISRDDSKSTLFLQMNSLTTDDTAVYYCARCPIPRAASYRNGDNYFEFGQGTLVTV | | | | | |
| | SSGGGGSGGGGSQAVVTQEPSLSVSPGGTVTLTCALSSASVSTSSYPSWYQQTPGQPPRMLI | | | | | |
| | HNTDTRSSGVPDRFSGSILGKKAALTITGAQADDESDYYCVVYLGNGFWVFGGGTKLTVLGG | | | | | |
| | GGGGGGGESKYGPPCPSCPAPEFLGGPSVFLFPPKPKDTLMISRTPEVTCVVVDVSQEDPEV | | | | | |
| | QFNWYVDGVEVHNAKTKPREEQFNSTYRVVSVLTVLHQDWLNGKEYKCKVSNKGLPSSIEKT | | | | | |
| | ISKAKGQPREPQVYTLPPSQEEMTKNQVSLTCLVKGFYPSDIAVEWESNGQPENNYKTTPPV | | | | | |
| | LDSDGSFFLYSRLTVDKSRWQEGNVFSCSVMHEALHNHYTQKSLSLSLGK | | | | | |
| 31B6- | 261 | 31B6 VH | 4GS3 | 31B6 VL | IgG2a Hinge | IgG2a |
| VH3VL- | EVQLLQSGGGVVQPGGSLRLSCEASGFTFSSYSMHWVRQAPGKGLEWLTLISYNGVNKYYAK | | | | | |
| IgG2a | SVKGRFAISRDDSKSTLFLQMNSLTTDDTAVYYCARCPIPRAASYRNGDNYFEFGQGTLVTV | | | | | |
| | SSGGGGSGGGGSGGGGSQAVVTQEPSLSVSPGGTVTLTCALSSASVSTSSYPSWYQQTPGQP | | | | | |
| | PRMLIHNTDTRSSGVPDRFSGSILGKKAALTITGAQADDESDYYCVVYLGNGFWVFGGGTKL | | | | | |
| | TVLEPRGPTIKPCPPCKCPAPNLLGGPSVFIFPPKIKDVLMISLSPIVTCVVVDVSEDDPDV | | | | | |
| | QISWFVNNVEVHTAQTQTHREDYNSTLRVVSALPIQHQDWMSGKEFKCKVNNKDLPAPIERT | | | | | |
| | ISKPKGSVRAPQVYVLPPPEEEMTKKQVTLTCMVTDFMPEDIYVEWTNNGKTELNYKNTEPV | | | | | |
| | LDSDGSYFMYSKLRVEKKNWVERNSYSCSVVHEGLHNHHTTKSFSRTPGK | | | | | |
| 31B6- | 262 | 31B6 VH | 4GS3 | 31B6 VL | 5G Modified IgG2a | IgG2a |
| VH3VL- | | | | | Hinge | |
| 5GIgG2a | EVQLLQSGGGVVQPGGSLRLSCEASGFTFSSYSMHWVRQAPGKGLEWLTLISYNGVNKYYAK | | | | | |
| | SVKGRFAISRDDSKSTLFLQMNSLTTDDTAVYYCARCPIPRAASYRNGDNYFEFGQGTLVTV | | | | | |
| | SSGGGGSGGGGSGGGGSQAVVTQEPSLSVSPGGTVTLTCALSSASVSTSSYPSWYQQTPGQP | | | | | |
| | PRMLIHNTDTRSSGVPDRFSGSILGKKAALTITGAQADDESDYYCVVYLGNGFWVFGGGTKL | | | | | |
| | TVLGGGGGEPRGPTIKPCPPCKCPAPNLLGGPSVFIFPPKIKDVLMISLSPIVTCVVVDVSE | | | | | |
| | DDPDVQISWFVNNVEVHTAQTQTHREDYNSTLRVVSALPIQHQDWMSGKEFKCKVNNKDLPA | | | | | |
| | PIERTISKPKGSVRAPQVYVLPPPEEEMTKKQVTLTCMVTDFMPEDIYVEWTNNGKTELNYK | | | | | |
| | NTEPVLDSDGSYFMYSKLRVEKKNWVERNSYSCSVVHEGLHNHHTTKSFSRTPGK | | | | | |
| 31B6- | 263 | 31B6 VH | 4GS3 | 31B6 VL | 9G Modified IgG2a | IgG2a |
| VH3VL- | | | | | Hinge | |
| 9GIgG2a | EVQLLQSGGGVVQPGGSLRLSCEASGFTFSSYSMHWVRQAPGKGLEWLTLISYNGVNKYYAK | | | | | |
| | SVKGRFAISRDDSKSTLFLQMNSLTTDDTAVYYCARCPIPRAASYRNGDNYFEFGQGTLVTV | | | | | |
| | SSGGGGSGGGGSGGGGSGGGGSQAVVTQEPSLSVSPGGTVTLTCALSSASVSTSSYPSWYQQ | | | | | |
| | TPGQPPRMLIHNTDTRSSGVPDRFSGSILGKKAALTITGAQADDESDYYCVVYLGNGFWVFG | | | | | |
| | GGTKLTVLEPRGPTIKPCPPCKCPAPNLLGGPSVFIFPPKIKDVLMISLSPIVTCVVVDVSE | | | | | |
| | DDPDVQISWFVNNVEVHTAQTQTHREDYNSTLRVVSALPIQHQDWMSGKEFKCKVNNKDLPA | | | | | |
| | PIERTISKPKGSVRAPQVYVLPPPEEEMTKKQVTLTCMVTDEMPEDIYVEWTNNGKTELNYK | | | | | |
| | NTEPVLDSDGSYFMYSKLRVEKKNWVERNSYSCSVVHEGLHNHHTTKSFSRTPGK | | | | | |
| 31B6- | 264 | 31B6 VH | 4GS4 | 31B6 VL | IgG2a Hinge | IgG2a |
| VH4VL- | EVQLLQSGGGVVQPGGSLRLSCEASGFTFSSYSMHWVRQAPGKGLEWLTLISYNGVNKYYAK | | | | | |
| IgG2a | SVKGRFAISRDDSKSTLFLQMNSLTTDDTAVYYCARCPIPRAASYRNGDNYFEFGQGTLVTV | | | | | |
| | SSGGGGSGGGGSGGGGSGGGGSQAVVTQEPSLSVSPGGTVTLTCALSSASVSTSSYPSWYQQ | | | | | |
| | TPGQPPRMLIHNTDTRSSGVPDRFSGSILGKKAALTITGAQADDESDYYCVVYLGNGFWVFG | | | | | |
| | GGTKLTVLEPRGPTIKPCPPCKCPAPNLLGGPSVFIFPPKIKDVLMISLSPIVTCVVVDVSE | | | | | |
| | DDPDVQISWFVNNVEVHTAQTQTHREDYNSTLRVVSALPIQHQDWMSGKEFKCKVNNKDLPA | | | | | |
| | PIERTISKPKGSVRAPQVYVLPPPEEEMTKKQVTLTCMVTDEMPEDIYVEWTNNGKTELNYK | | | | | |
| | NTEPVLDSDGSYFMYSKLRVEKKNWVERNSYSCSVVHEGLHNHHTTKSFSRTPGK | | | | | |
| 31B6- | 265 | 31B6 VH | 4GS4 | 31B6 VL | 5G Modified IgG2a | IgG2a |
| VH4VL- | | | | | Hinge | |
| 5GIgG2a | EVQLLQSGGGVVQPGGSLRLSCEASGFTFSSYSMHWVRQAPGKGLEWLTLISYNGVNKYYAK | | | | | |
| | SVKGRFAISRDDSKSTLFLQMNSLTTDDTAVYYCARCPIPRAASYRNGDNYFEFGQGTLVTV | | | | | |
| | SSGGGGSGGGGSGGGGSGGGGSQAVVTQEPSLSVSPGGTVTLTCALSSASVSTSSYPSWYQQ | | | | | |
| | TPGQPPRMLIHNTDTRSSGVPDRFSGSILGKKAALTITGAQADDESDYYCVVYLGNGFWVFG | | | | | |
| | GGTKLTVLGGGGGEPRGPTIKPCPPCKCPAPNLLGGPSVFIFPPKIKDVLMISLSPIVTCVV | | | | | |
| | VDVSEDDPDVQISWFVNNVEVHTAQTQTHREDYNSTLRVVSALPIQHQDWMSGKEFKCKVNN | | | | | |
| | KDLPAPIERTISKPKGSVRAPQVYVLPPPEEEMTKKQVTLTCMVTDFMPEDIYVEWTNNGKT | | | | | |
| | ELNYKNTEPVLDSDGSYFMYSKLRVEKKNWVERNSYSCSVVHEGLHNHHTTKSFSRTPGK | | | | | |
| 31B6- | 266 | 31B6 VH | 4GS4 | 31B6 VL | 9G Modified IgG2a | IgG2a |
| VH4VL- | | | | | Hinge | |
| 9GIgG2a | EVQLLQSGGGVVQPGGSLRLSCEASGFTFSSYSMHWVRQAPGKGLEWLTLISYNGVNKYYAK | | | | | |
| | SVKGRFAISRDDSKSTLFLQMNSLTTDDTAVYYCARCPIPRAASYRNGDNYFEFGQGTLVTV | | | | | |
| | SSGGGGSGGGGSGGGGSGGGGSQAVVTQEPSLSVSPGGTVTLTCALSSASVSTSSYPSWYQQ | | | | | |
| | TPGQPPRMLIHNTDTRSSGVPDRFSGSILGKKAALTITGAQADDESDYYCVVYLGNGFWVFG | | | | | |
| | GGTKLTVLGGGGGGGGGEPRGPTIKPCPPCKCPAPNLLGGPSVFIFPPKIKDVLMISLSPIV | | | | | |
| | TCVVVDVSEDDPDVQISWFVNNVEVHTAQTQTHREDYNSTLRVVSALPIQHQDWMSGKEFKC | | | | | |
| | KVNNKDLPAPIERTISKPKGSVRAPQVYVLPPPEEEMTKKQVTLTCMVTDEMPEDIYVEWTN | | | | | |
| | NGKTELNYKNTEPVLDSDGSYFMYSKLRVEKKNWVERNSYSCSVVHEGLHNHHTTKSFSRTP | | | | | |
| | GK | | | | | |
| 31B6- | 267 | 31B6 VL | 4GS2 | 31B6 VH | IgG2a Hinge | IgG2a |
| VL2VH- | QAVVTQEPSLSVSPGGTVTLTCALSSASVSTSSYPSWYQQTPGQPPRMLIHNTDTRSSGVPD | | | | | |
| IgG2a | RFSGSILGKKAALTITGAQADDESDYYCVVYLGNGFWVFGGGTKLTVLGGGGSGGGGSEVQL | | | | | |
| | LQSGGGVVQPGGSLRLSCEASGFTFSSYSMHWVRQAPGKGLEWLTLISYNGVNKYYAKSVKG | | | | | |
| | RFAISRDDSKSTLFLQMNSLTTDDTAVYYCARCPIPRAASYRNGDNYFEFGQGTLVTVSSEP | | | | | |
| | RGPTIKPCPPCKCPAPNLLGGPSVFIFPPKIKDVLMISLSPIVTCVVVDVSEDDPDVQISWF | | | | | |
| | VNNVEVHTAQTQTHREDYNSTLRVVSALPIQHQDWMSGKEFKCKVNNKDLPAPIERTISKPK | | | | | |
| | GSVRAPQVYVLPPPEEEMTKKQVTLTCMVTDEMPEDIYVEWTNNGKTELNYKNTEPVLDSDG | | | | | |
| | SYFMYSKLRVEKKNWVERNSYSCSVVHEGLHNHHTTKSFSRTPGK | | | | | |
| 31B6- | 268 | 31B6 VL | 4GS2 | 31B6 VH | 5G Modified IgG2a | IgG2a |
| VL2VH- | | | | | Hinge | |
| 5GIgG2a | QAVVTQEPSLSVSPGGTVTLTCALSSASVSTSSYPSWYQQTPGQPPRMLIHNTDTRSSGVPD | | | | | |
| | RFSGSILGKKAALTITGAQADDESDYYCVVYLGNGFWVFGGGTKLTVLGGGGSGGGGSEVQL | | | | | |
| | LQSGGGVVQPGGSLRLSCEASGFTFSSYSMHWVRQAPGKGLEWLTLISYNGVNKYYAKSVKG | | | | | |
| | RFAISRDDSKSTLFLQMNSLTTDDTAVYYCARCPIPRAASYRNGDNYFEFGQGTLVTVSSGG | | | | | |
| | GGGEPRGPTIKPCPPCKCPAPNLLGGPSVFIFPPKIKDVLMISLSPIVTCVVVDVSEDDPDV | | | | | |
| | QISWFVNNVEVHTAQTQTHREDYNSTLRVVSALPIQHQDWMSGKEFKCKVNNKDLPAPIERT | | | | | |
| | ISKPKGSVRAPQVYVLPPPEEEMTKKQVTLTCMVTDFMPEDIYVEWTNNGKTELNYKNTEPV | | | | | |
| | LDSDGSYFMYSKLRVEKKNWVERNSYSCSVVHEGLHNHHTTKSFSRTPGK | | | | | |
| 31B6- | 269 | 31B6 VL | 4GS2 | 31B6 VH | 9G Modified IgG2a | IgG2a |
| VL2VH- | | | | | Hinge | |
| 9GIgG2a | QAVVTQEPSLSVSPGGTVTLTCALSSASVSTSSYPSWYQQTPGQPPRMLIHNTDTRSSGVPD | | | | | |
| | RFSGSILGKKAALTITGAQADDESDYYCVVYLGNGFWVFGGGTKLTVLGGGGSGGGGSEVQL | | | | | |
| | LQSGGGVVQPGGSLRLSCEASGFTFSSYSMHWVRQAPGKGLEWLTLISYNGVNKYYAKSVKG | | | | | |
| | RFAISRDDSKSTLFLQMNSLTTDDTAVYYCARCPIPRAASYRNGDNYFEFGQGTLVTVSSGG | | | | | |
| | GGGGGGGEPRGPTIKPCPPCKCPAPNLLGGPSVFIFPPKIKDVLMISLSPIVTCVVVDVSED | | | | | |
| | DPDVQISWFVNNVEVHTAQTQTHREDYNSTLRVVSALPIQHQDWMSGKEFKCKVNNKDLPAP | | | | | |
| | IERTISKPKGSVRAPQVYVLPPPEEEMTKKQVTLTCMVTDEMPEDIYVEWTNNGKTELNYKN | | | | | |
| | TEPVLDSDGSYFMYSKLRVEKKNWVERNSYSCSVVHEGLHNHHTTKSFSRTPGK | | | | | |
| 31B6- | 270 | 31B6 VL | 4GS3 | 31B6 VH | IgG2a Hinge | IgG2a |
| VL3VH- | QAVVTQEPSLSVSPGGTVTLTCALSSASVSTSSYPSWYQQTPGQPPRMLIHNTDTRSSGVPD | | | | | |
| IgG2a | RFSGSILGKKAALTITGAQADDESDYYCVVYLGNGFWVFGGGTKLTVLGGGGSGGGGSGGGG | | | | | |
| | SEVQLLQSGGGVVQPGGSLRLSCEASGFTFSSYSMHWVRQAPGKGLEWLTLISYNGVNKYYA | | | | | |
| | KSVKGRFAISRDDSKSTLFLQMNSLTTDDTAVYYCARCPIPRAASYRNGDNYFEFGQGTLVT | | | | | |
| | VSSEPRGPTIKPCPPCKCPAPNLLGGPSVFIFPPKIKDVLMISLSPIVTCVVVDVSEDDPDV | | | | | |
| | QISWFVNNVEVHTAQTQTHREDYNSTLRVVSALPIQHQDWMSGKEFKCKVNNKDLPAPIERT | | | | | |
| | ISKPKGSVRAPQVYVLPPPEEEMTKKQVTLTCMVTDFMPEDIYVEWTNNGKTELNYKNTEPV | | | | | |
| | LDSDGSYFMYSKLRVEKKNWVERNSYSCSVVHEGLHNHHTTKSFSRTPGK | | | | | |
| 31B6- | 271 | 31B6 VL | 4GS3 | 31B6 VH | 5G Modified IgG2a | IgG2a |
| VL3 VH- | | | | | Hinge | |

| | |
|---|---|
| 5GIgG2a | QAVVTQEPSLSVSPGGTVTLTCALSSASVSTSSYPSWYQQTPGQPPRMLIHNTDTRSSGVPD |
| | RFSGSILGKKAALTITGAQADDESDYYCVVYLGNGFWVFGGGTKLTVLGGGGSGGGGSGGGG |
| | SEVQLLQSGGGVVQPGGSLRLSCEASGFTFSSYSMHWVRQAPGKGLEWLTLISYNGVNKYYA |
| | KSVKGRFAISRDDSKSTLFLQMNSLTTDDTAVYYCARCPIPRAASYRNGDNYFEFGQGTLVT |
| | VSSGGGGGEPRGPTIKPCPPCKCPAPNLLGGPSVFIFPPKIKDVLMISLSPIVTCVVVDVSE |
| | DDPDVQISWFVNNVEVHTAQTQTHREDYNSTLRVVSALPIQHQDWMSGKEFKCKVNNKDLPA |
| | PIERTISKPKGSVRAPQVYVLPPPEEEMTKKQVTLTCMVTDEMPEDIYVEWTNNGKTELNYK |
| | NTEPVLDSDGSYFMYSKLRVEKKNWVERNSYSCSVVHEGLHNHHTTKSFSRTPGK |

| 31B6- | 272 | 31B6 VL | 4GS3 | 31B6 VH | 9G Modified IgG2a | IgG2a |
|---|---|---|---|---|---|---|
| VL3VH- | | | | | Hinge | |
| 9GIgG2a | QAVVTQEPSLSVSPGGTVTLTCALSSASVSTSSYPSWYQQTPGQPPRMLIHNTDTRSSGVPD | | | | | |
| | RFSGSILGKKAALTITGAQADDESDYYCVVYLGNGFWVFGGGTKLTVLGGGGGGGGSGGGG | | | | | |
| | SEVQLLQSGGGVVQPGGSLRLSCEASGFTFSSYSMHWVRQAPGKGLEWLTLISYNGVNKYYA | | | | | |
| | KSVKGRFAISRDDSKSTLFLQMNSLTTDDTAVYYCARCPIPRAASYRNGDNYFEFGQGTLVT | | | | | |
| | VSSGGGGGGGGGEPRGPTIKPCPPCKCPAPNLLGGPSVFIFPPKIKDVLMISLSPIVTCVVV | | | | | |
| | DVSEDDPDVQISWFVNNVEVHTAQTQTHREDYNSTLRVVSALPIQHQDWMSGKEFKCKVNNK | | | | | |
| | DLPAPIERTISKPKGSVRAPQVYVLPPPEEEMTKKQVTLTCMVTDFMPEDIYVEWTNNGKTE | | | | | |
| | LNYKNTEPVLDSDGSYFMYSKLRVEKKNWVERNSYSCSVVHEGLHNHHTTKSFSRTPGK | | | | | |
| 31B6- | 273 | 31B6 VL | 4GS4 | 31B6 VH | IgG2a Hinge | IgG2a |
| VL4VH- | QAVVTQEPSLSVSPGGTVTLTCALSSASVSTSSYPSWYQQTPGQPPRMLIHNTDTRSSGVPD | | | | | |
| IgG2a | RFSGSILGKKAALTITGAQADDESDYYCVVYLGNGFWVFGGGTKLTVLGGGGSGGGGSGGGG | | | | | |
| | SGGGGSEVQLLQSGGGVVQPGGSLRLSCEASGFTESSYSMHWVRQAPGKGLEWLTLISYNGV | | | | | |
| | NKYYAKSVKGRFAISRDDSKSTLFLQMNSLTTDDTAVYYCARCPIPRAASYRNGDNYFEFGQ | | | | | |
| | GTLVTVSSEPRGPTIKPCPPCKCPAPNLLGGPSVFIFPPKIKDVLMISLSPIVTCVVVDVSE | | | | | |
| | DDPDVQISWFVNNVEVHTAQTQTHREDYNSTLRVVSALPIQHQDWMSGKEFKCKVNNKDLPA | | | | | |
| | PIERTISKPKGSVRAPQVYVLPPPEEEMTKKQVTLTCMVTDEMPEDIYVEWTNNGKTELNYK | | | | | |
| | NTEPVLDSDGSYFMYSKLRVEKKNWVERNSYSCSVVHEGLHNHHTTKSFSRTPGK | | | | | |
| 31B6- | 274 | 31B6 VL | 4GS4 | 31B6 VH | 5G Modified IgG2a | IgG2a |
| VL4VH- | | | | | Hinge | |
| 5GIgG2a | QAVVTQEPSLSVSPGGTVTLTCALSSASVSTSSYPSWYQQTPGQPPRMLIHNTDTRSSGVPD | | | | | |
| | RFSGSILGKKAALTITGAQADDESDYYCVVYLGNGFWVFGGGTKLTVLGGGGSGGGGSGGGG | | | | | |
| | SGGGGSEVQLLQSGGGVVQPGGSLRLSCEASGFTFSSYSMHWVRQAPGKGLEWLTLISYNGV | | | | | |
| | NKYYAKSVKGRFAISRDDSKSTLFLQMNSLTTDDTAVYYCARCPIPRAASYRNGDNYFEFGQ | | | | | |
| | GTLVTVSSGGGGGEPRGPTIKPCPPCKCPAPNLLGGPSVFIFPPKIKDVLMISLSPIVTCVV | | | | | |
| | VDVSEDDPDVQISWFVNNVEVHTAQTQTHREDYNSTLRVVSALPIQHQDWMSGKEFKCKVNN | | | | | |
| | KDLPAPIERTISKPKGSVRAPQVYVLPPPEEEMTKKQVTLTCMVTDFMPEDIYVEWTNNGKT | | | | | |
| | ELNYKNTEPVLDSDGSYFMYSKLRVEKKNWVERNSYSCSVVHEGLHNHHTTKSFSRTPGK | | | | | |
| 31B6- | 275 | 31B6 VL | 4GS4 | 31B6 VH | 9G Modified IgG2a | IgG2a |
| VL4VH- | | | | | Hinge | |
| 9GIgG2a | QAVVTQEPSLSVSPGGTVTLTCALSSASVSTSSYPSWYQQTPGQPPRMLIHNTDTRSSGVPD | | | | | |
| | RFSGSILGKKAALTITGAQADDESDYYCVVYLGNGFWVFGGGTKLTVLGGGGSGGGGSGGGG | | | | | |
| | SGGGGSEVQLLQSGGGVVQPGGSLRLSCEASGFTFSSYSMHWVRQAPGKGLEWLTLISYNGV | | | | | |
| | NKYYAKSVKGRFAISRDDSKSTLFLQMNSLTTDDTAVYYCARCPIPRAASYRNGDNYFEFGQ | | | | | |
| | GTLVTVSSGGGGGGGGGEPRGPTIKPCPPCKCPAPNLLGGPSVFIFPPKIKDVLMISLSPIV | | | | | |
| | TCVVVDVSEDDPDVQISWFVNNVEVHTAQTQTHREDYNSTLRVVSALPIQHQDWMSGKEFKC | | | | | |
| | KVNNKDLPAPIERTISKPKGSVRAPQVYVLPPPEEEMTKKQVTLTCMVTDFMPEDIYVEWTN | | | | | |
| | NGKTELNYKNTEPVLDSDGSYFMYSKLRVEKKNWVERNSYSCSVVHEGLHNHHTTKSFSRTP | | | | | |
| | GK | | | | | |
| 8H1- | 276 | 8H1 VH | 4GS2 | 8H1 VL | IgG2a Hinge | IgG2a |
| VH2VL- | EVQLVESGGGLVQPGGSLRLSCAASGFTFSIYTMSWVRQAPGKGLEWVSAILSDGSTYYADS | | | | | |
| IgG2a | VEGRFTISRDNSKTTLYLQMNSLTAEDTAVYYCTKRVEGSFRGWGQGTLVTVSSGGGGSGGG | | | | | |
| | GSEIVMTQSPGTLSLSPGESATLSCRASQSVSTTYLAWYQQKPGQAPRLLIYGASSRATGIP | | | | | |
| | DRFSGSGSGTDFTLTISRLEPEDFAVYYCQQYGGSRLITFGQGTRLEIKEPRGPTIKPCPPC | | | | | |
| | KCPAPNLLGGPSVFIFPPKIKDVLMISLSPIVTCVVVDVSEDDPDVQISWFVNNVEVHTAQT | | | | | |
| | QTHREDYNSTLRVVSALPIQHQDWMSGKEFKCKVNNKDLPAPIERTISKPKGSVRAPQVYVL | | | | | |
| | PPPEEEMTKKQVTLTCMVTDFMPEDIYVEWTNNGKTELNYKNTEPVLDSDGSYFMYSKLRVE | | | | | |
| | KKNWVERNSYSCSVVHEGLHNHHTTKSFSRTPGK | | | | | |
| 8H1- | 277 | 8H1 VH | 4GS2 | 8H1 VL | IgG4 Hinge | IgG4 |
| VH2VL- | EVQLVESGGGLVQPGGSLRLSCAASGFTFSIYTMSWVRQAPGKGLEWVSAILSDGSTYYADS | | | | | |
| IgG4 | VEGRFTISRDNSKTTLYLQMNSLTAEDTAVYYCTKRVEGSFRGWGQGTLVTVSSGGGGSGGG | | | | | |
| | GSEIVMTQSPGTLSLSPGESATLSCRASQSVSTTYLAWYQQKPGQAPRLLIYGASSRATGIP | | | | | |
| | DRFSGSGSGTDFTLTISRLEPEDFAVYYCQQYGGSRLITFGQGTRLEIKESKYGPPCPSCPA | | | | | |
| | PEFLGGPSVFLFPPKPKDTLMISRTPEVTCVVVDVSQEDPEVQFNWYVDGVEVHNAKTKPRE | | | | | |
| | EQFNSTYRVVSVLTVLHQDWLNGKEYKCKVSNKGLPSSIEKTISKAKGQPREPQVYTLPPSQ | | | | | |
| | EEMTKNQVSLTCLVKGFYPSDIAVEWESNGQPENNYKTTPPVLDSDGSFFLYSRLTVDKSRW | | | | | |
| | QEGNVFSCSVMHEALHNHYTQKSLSLSLGK | | | | | |
| 8H1- | 278 | 8H1 VH | 4GS2 | 8H1 VL | 5G Modified IgG2a | IgG2a |
| VH2VL- | | | | | Hinge | |
| 5GIgG2a | EVQLVESGGGLVQPGGSLRLSCAASGFTFSIYTMSWVRQAPGKGLEWVSAILSDGSTYYADS | | | | | |
| | VEGRFTISRDNSKTTLYLQMNSLTAEDTAVYYCTKRVEGSFRGWGQGTLVTVSSGGGGSGGG | | | | | |
| | GSEIVMTQSPGTLSLSPGESATLSCRASQSVSTTYLAWYQQKPGQAPRLLIYGASSRATGIP | | | | | |
| | DRFSGSGSGTDFTLTISRLEPEDFAVYYCQQYGGSRLITFGQGTRLEIKGGGGGEPRGPTIK | | | | | |
| | PCPPCKCPAPNLLGGPSVFIFPPKIKDVLMISLSPIVTCVVVDVSEDDPDVQISWFVNNVEV | | | | | |
| | HTAQTQTHREDYNSTLRVVSALPIQHQDWMSGKEFKCKVNNKDLPAPIERTISKPKGSVRAP | | | | | |
| | QVYVLPPPEEEMTKKQVTLTCMVTDFMPEDIYVEWTNNGKTELNYKNTEPVLDSDGSYFMYS | | | | | |
| | KLRVEKKNWVERNSYSCSVVHEGLHNHHTTKSFSRTPGK | | | | | |
| 8H1- | 279 | 8H1 VH | 4GS2 | 8H1 VL | 5G Modified IgG4 | IgG4 |
| VH2VL- | | | | | Hinge | |
| 5GIgG4 | EVQLVESGGGLVQPGGSLRLSCAASGFTFSIYTMSWVRQAPGKGLEWVSAILSDGSTYYADS | | | | | |
| | VEGRFTISRDNSKTTLYLQMNSLTAEDTAVYYCTKRVEGSFRGWGQGTLVTVSSGGGGSGGG | | | | | |
| | GSEIVMTQSPGTLSLSPGESATLSCRASQSVSTTYLAWYQQKPGQAPRLLIYGASSRATGIP | | | | | |
| | DRFSGSGSGTDFTLTISRLEPEDFAVYYCQQYGGSRLITFGQGTRLEIKGGGGGESKYGPPC | | | | | |
| | PSCPAPEFLGGPSVFLFPPKPKDTLMISRTPEVTCVVVDVSQEDPEVQFNWYVDGVEVHNAK | | | | | |
| | TKPREEQFNSTYRVVSVLTVLHQDWLNGKEYKCKVSNKGLPSSIEKTISKAKGQPREPQVYT | | | | | |
| | LPPSQEEMTKNQVSLTCLVKGFYPSDIAVEWESNGQPENNYKTTPPVLDSDGSFFLYSRLTV | | | | | |
| | DKSRWQEGNVFSCSVMHEALHNHYTQKSLSLSLGK | | | | | |
| 8H1- | 280 | 8H1 VH | 4GS2 | 8H1 VL | 9G Modified IgG2a | IgG2a |
| VH2VL- | | | | | Hinge | |
| 9GIgG2a | EVQLVESGGGLVQPGGSLRLSCAASGFTFSIYTMSWVRQAPGKGLEWVSAILSDGSTYYADS | | | | | |
| | VEGRFTISRDNSKTTLYLQMNSLTAEDTAVYYCTKRVEGSFRGWGQGTLVTVSSGGGGSGGG | | | | | |
| | GSEIVMTQSPGTLSLSPGESATLSCRASQSVSTTYLAWYQQKPGQAPRLLIYGASSRATGIP | | | | | |
| | DRFSGSGSGTDFTLTISRLEPEDFAVYYCQQYGGSRLITFGQGTRLEIKGGGGGGGGGEPRG | | | | | |
| | PTIKPCPPCKCPAPNLLGGPSVFIFPPKIKDVLMISLSPIVTCVVVDVSEDDPDVQISWFVN | | | | | |
| | NVEVHTAQTQTHREDYNSTLRVVSALPIQHQDWMSGKEFKCKVNNKDLPAPIERTISKPKGS | | | | | |
| | VRAPQVYVLPPPEEEMTKKQVTLTCMVTDFMPEDIYVEWTNNGKTELNYKNTEPVLDSDGSY | | | | | |
| | FMYSKLRVEKKNWVERNSYSCSVVHEGLHNHHTTKSFSRTPGK | | | | | |
| 8H1- | 281 | 8H1 VH | 4GS2 | 8H1 VL | 9G Modified IgG4 | IgG4 |
| VH2VL- | | | | | Hinge | |
| 9GIgG4 | EVQLVESGGGLVQPGGSLRLSCAASGFTFSIYTMSWVRQAPGKGLEWVSAILSDGSTYYADS | | | | | |
| | VEGRFTISRDNSKTTLYLQMNSLTAEDTAVYYCTKRVEGSFRGWGQGTLVTVSSGGGGSGGG | | | | | |
| | GSEIVMTQSPGTLSLSPGESATLSCRASQSVSTTYLAWYQQKPGQAPRLLIYGASSRATGIP | | | | | |
| | DRESGSGSGTDFTLTISRLEPEDFAVYYCQQYGGSRLITFGQGTRLEIKGGGGGGGGGESKY | | | | | |
| | GPPCPSCPAPEFLGGPSVFLFPPKPKDTLMISRTPEVTCVVVDVSQEDPEVQFNWYVDGVEV | | | | | |
| | HNAKTKPREEQFNSTYRVVSVLTVLHQDWLNGKEYKCKVSNKGLPSSIEKTISKAKGQPREP | | | | | |
| | QVYTLPPSQEEMTKNQVSLTCLVKGFYPSDIAVEWESNGQPENNYKTTPPVLDSDGSFFLYS | | | | | |
| | RLTVDKSRWQEGNVFSCSVMHEALHNHYTQKSLSLSLGK | | | | | |
| 8H1- | 282 | 8H1 VH | 4GS3 | 8H1 VL | IgG2a Hinge | IgG2a |
| VH3VL- | EVQLVESGGGLVQPGGSLRLSCAASGFTFSIYTMSWVRQAPGKGLEWVSAILSDGSTYYADS | | | | | |
| IgG2a | VEGRFTISRDNSKTTLYLQMNSLTAEDTAVYYCTKRVEGSFRGWGQGTLVTVSSGGGGSGGG | | | | | |
| | GSGGGGSEIVMTQSPGTLSLSPGESATLSCRASQSVSTTYLAWYQQKPGQAPRLLIYGASSR | | | | | |
| | ATGIPDRFSGSGSGTDFTLTISRLEPEDFAVYYCQQYGGSRLITFGQGTRLEIKEPRGPTIK | | | | | |
| | PCPPCKCPAPNLLGGPSVFIFPPKIKDVLMISLSPIVTCVVVDVSEDDPDVQISWFVNNVEV | | | | | |
| | HTAQTQTHREDYNSTLRVVSALPIQHQDWMSGKEFKCKVNNKDLPAPIERTISKPKGSVRAP | | | | | |
| | QVYVLPPPEEEMTKKQVTLTCMVTDFMPEDIYVEWTNNGKTELNYKNTEPVLDSDGSYFMYS | | | | | |
| | KLRVEKKNWVERNSYSCSVVHEGLHNHHTTKSFSRTPGK | | | | | |
| 8H1- | 283 | 8H1 VH | 4GS3 | 8H1 VL | 5G Modified IgG2a | IgG2a |
| VH3VL- | | | | | Hinge | |
| 5GIgG2a | EVQLVESGGGLVQPGGSLRLSCAASGFTFSIYTMSWVRQAPGKGLEWVSAILSDGSTYYADS | | | | | |
| | VEGRFTISRDNSKTTLYLQMNSLTAEDTAVYYCTKRVEGSFRGWGQGTLVTVSSGGGGSGGG | | | | | |
| | GSGGGGSEIVMTQSPGTLSLSPGESATLSCRASQSVSTTYLAWYQQKPGQAPRLLIYGASSR | | | | | |
| | ATGIPDRFSGSGSGTDFTLTISRLEPEDFAVYYCQQYGGSRLITFGQGTRLEIKGGGGGEPR | | | | | |
| | GPTIKPCPPCKCPAPNLLGGPSVFIFPPKIKDVLMISLSPIVTCVVVDVSEDDPDVQISWFV | | | | | |
| | NNVEVHTAQTQTHREDYNSTLRVVSALPIQHQDWMSGKEFKCKVNNKDLPAPIERTISKPKG | | | | | |
| | SVRAPQVYVLPPPEEEMTKKQVTLTCMVTDFMPEDIYVEWTNNGKTELNYKNTEPVLDSDGS | | | | | |
| | YFMYSKLRVEKKNWVERNSYSCSVVHEGLHNHHTTKSFSRTPGK | | | | | |
| 8H1- | 284 | 8H1 VH | 4GS3 | 8H1 VL | 9G Modified IgG2a | IgG2a |
| VH3VL- | | | | | Hinge | |
| 9GIgG2a | EVQLVESGGGLVQPGGSLRLSCAASGFTFSIYTMSWVRQAPGKGLEWVSAILSDGSTYYADS | | | | | |
| | VEGRFTISRDNSKTTLYLQMNSLTAEDTAVYYCTKRVEGSFRGWGQGTLVTVSSGGGGSGGG | | | | | |
| | GSGGGGSEIVMTQSPGTLSLSPGESATLSCRASQSVSTTYLAWYQQKPGQAPRLLIYGASSR | | | | | |
| | ATGIPDRFSGSGSGTDFTLTISRLEPEDFAVYYCQQYGGSRLITFGQGTRLEIKGGGGGGGG | | | | | |
| | GEPRGPTIKPCPPCKCPAPNLLGGPSVFIFPPKIKDVLMISLSPIVTCVVVDVSEDDPDVQI | | | | | |
| | SWFVNNVEVHTAQTQTHREDYNSTLRVVSALPIQHQDWMSGKEFKCKVNNKDLPAPIERTIS | | | | | |
| | KPKGSVRAPQVYVLPPPEEEMTKKQVTLTCMVTDFMPEDIYVEWTNNGKTELNYKNTEPVLD | | | | | |
| | SDGSYFMYSKLRVEKKNWVERNSYSCSVVHEGLHNHHTTKSFSRTPGK | | | | | |
| 8H1- | 285 | 8H1 VH | 4GS4 | 8H1 VL | IgG2a Hinge | IgG2a |
| VH4VL- | EVQLVESGGGLVQPGGSLRLSCAASGFTFSIYTMSWVRQAPGKGLEWVSAILSDGSTYYADS | | | | | |
| IgG2a | VEGRFTISRDNSKTTLYLQMNSLTAEDTAVYYCTKRVEGSFRGWGQGTLVTVSSGGGGSGGG | | | | | |
| | GSGGGGSGGGGSEIVMTQSPGTLSLSPGESATLSCRASQSVSTTYLAWYQQKPGQAPRLLIY | | | | | |
| | GASSRATGIPDRFSGSGSGTDFTLTISRLEPEDFAVYYCQQYGGSRLITFGQGTRLEIKEPR | | | | | |
| | GPTIKPCPPCKCPAPNLLGGPSVFIFPPKIKDVLMISLSPIVTCVVVDVSEDDPDVQISWFV | | | | | |
| | NNVEVHTAQTQTHREDYNSTLRVVSALPIQHQDWMSGKEFKCKVNNKDLPAPIERTISKPKG | | | | | |
| | SVRAPQVYVLPPPEEEMTKKQVTLTCMVTDEMPEDIYVEWTNNGKTELNYKNTEPVLDSDGS | | | | | |
| | YFMYSKLRVEKKNWVERNSYSCSVVHEGLHNHHTTKSFSRTPGK | | | | | |
| 8H1- | 286 | 8H1 VH | 4GS4 | 8H1 VL | 5G Modified IgG2a | IgG2a |
| VH4VL- | | | | | Hinge | |
| 5GIgG2a | EVQLVESGGGLVQPGGSLRLSCAASGFTFSIYTMSWVRQAPGKGLEWVSAILSDGSTYYADS | | | | | |
| | VEGRFTISRDNSKTTLYLQMNSLTAEDTAVYYCTKRVEGSFRGWGQGTLVTVSSGGGGSGGG | | | | | |
| | GSGGGGSGGGGSEIVMTQSPGTLSLSPGESATLSCRASQSVSTTYLAWYQQKPGQAPRLLIY | | | | | |
| | GASSRATGIPDRFSGSGSGTDFTLTISRLEPEDFAVYYCQQYGGSRLITFGQGTRLEIKGGG | | | | | |
| | GGEPRGPTIKPCPPCKCPAPNLLGGPSVFIFPPKIKDVLMISLSPIVTCVVVDVSEDDPDVQ | | | | | |
| | ISWFVNNVEVHTAQTQTHREDYNSTLRVVSALPIQHQDWMSGKEFKCKVNNKDLPAPIERTI | | | | | |
| | SKPKGSVRAPQVYVLPPPEEEMTKKQVTLTCMVTDEMPEDIYVEWTNNGKTELNYKNTEPVL | | | | | |
| | DSDGSYFMYSKLRVEKKNWVERNSYSCSVVHEGLHNHHTTKSFSRTPGK | | | | | |
| 8H1- | 287 | 8H1 VH | 4GS4 | 8H1 VL | 9G Modified IgG2a | IgG2a |
| VH4VL- | | | | | Hinge | |
| 9GIgG2a | EVQLVESGGGLVQPGGSLRLSCAASGFTFSIYTMSWVRQAPGKGLEWVSAILSDGSTYYADS | | | | | |
| | VEGRFTISRDNSKTTLYLQMNSLTAEDTAVYYCTKRVEGSFRGWGQGTLVTVSSGGGGSGGG | | | | | |
| | GSGGGGSGGGGSEIVMTQSPGTLSLSPGESATLSCRASQSVSTTYLAWYQQKPGQAPRLLIY | | | | | |
| | GASSRATGIPDRFSGSGSGTDFTLTISRLEPEDFAVYYCQQYGGSRLITFGQGTRLEIKGGG | | | | | |
| | GGGGGGEPRGPTIKPCPPCKCPAPNLLGGPSVFIFPPKIKDVLMISLSPIVTCVVVDVSEDD | | | | | |
| | PDVQISWFVNNVEVHTAQTQTHREDYNSTLRVVSALPIQHQDWMSGKEFKCKVNNKDLPAPI | | | | | |
| | ERTISKPKGSVRAPQVYVLPPPEEEMTKKQVTLTCMVTDFMPEDIYVEWTNNGKTELNYKNT | | | | | |
| | EPVLDSDGSYFMYSKLRVEKKNWVERNSYSCSVVHEGLHNHHTTKSFSRTPGK | | | | | |
| 8H1- | 288 | 8H1 VL | 4GS2 | 8H1 VH | IgG2a Hinge | IgG2a |
| VL2VH- | | | | | | |
| IgG2a | EIVMTQSPGTLSLSPGESATLSCRASQSVSTTYLAWYQQKPGQAPRLLIYGASSRATGIPDR | | | | | |
| | FSGSGSGTDFTLTISRLEPEDFAVYYCQQYGGSRLITFGQGTRLEIKGGGGSGGGGSEVQLV | | | | | |
| | ESGGGLVQPGGSLRLSCAASGFTFSIYTMSWVRQAPGKGLEWVSAILSDGSTYYADSVEGRF | | | | | |
| | TISRDNSKTTLYLQMNSLTAEDTAVYYCTKRVEGSFRGWGQGTLVTVSSEPRGPTIKPCPPC | | | | | |
| | KCPAPNLLGGPSVFIFPPKIKDVLMISLSPIVTCVVVDVSEDDPDVQISWFVNNVEVHTAQT | | | | | |
| | QTHREDYNSTLRVVSALPIQHQDWMSGKEFKCKVNNKDLPAPIERTISKPKGSVRAPQVYVL | | | | | |
| | PPPEEEMTKKQVTLTCMVTDEMPEDIYVEWTNNGKTELNYKNTEPVLDSDGSYFMYSKLRVE | | | | | |
| | KKNWVERNSYSCSVVHEGLHNHHTTKSFSRTPGK | | | | | |
| 8H1- | 289 | 8H1 VL | 4GS2 | 8H1 VH | 5G Modified IgG2a | IgG2a |
| VL2VH- | | | | | Hinge | |
| 5GIgG2a | EIVMTQSPGTLSLSPGESATLSCRASQSVSTTYLAWYQQKPGQAPRLLIYGASSRATGIPDR | | | | | |
| | FSGSGSGTDFTLTISRLEPEDFAVYYCQQYGGSRLITFGQGTRLEIKGGGGSGGGGSEVQLV | | | | | |
| | ESGGGLVQPGGSLRLSCAASGFTFSIYTMSWVRQAPGKGLEWVSAILSDGSTYYADSVEGRF | | | | | |
| | TISRDNSKTTLYLQMNSLTAEDTAVYYCTKRVEGSFRGWGQGTLVTVSSGGGGGEPRGPTIK | | | | | |
| | PCPPCKCPAPNLLGGPSVFIFPPKIKDVLMISLSPIVTCVVVDVSEDDPDVQISWFVNNVEV | | | | | |
| | HTAQTQTHREDYNSTLRVVSALPIQHQDWMSGKEFKCKVNNKDLPAPIERTISKPKGSVRAP | | | | | |
| | QVYVLPPPEEEMTKKQVTLTCMVTDFMPEDIYVEWTNNGKTELNYKNTEPVLDSDGSYFMYS | | | | | |
| | KLRVEKKNWVERNSYSCSVVHEGLHNHHTTKSFSRTPGK | | | | | |
| 8H1- | 290 | 8H1 VL | 4GS2 | 8H1 VH | 9G Modified IgG2a | IgG2a |
| VL2VH- | | | | | Hinge | |
| 9GIgG2a | EIVMTQSPGTLSLSPGESATLSCRASQSVSTTYLAWYQQKPGQAPRLLIYGASSRATGIPDR | | | | | |
| | FSGSGSGTDFTLTISRLEPEDFAVYYCQQYGGSRLITFGQGTRLEIKGGGGSGGGGSEVQLV | | | | | |
| | ESGGGLVQPGGSLRLSCAASGFTFSIYTMSWVRQAPGKGLEWVSAILSDGSTYYADSVEGRE | | | | | |
| | TISRDNSKTTLYLQMNSLTAEDTAVYYCTKRVEGSFRGWGQGTLVTVSSGGGGGGGGGEPRG | | | | | |
| | PTIKPCPPCKCPAPNLLGGPSVFIFPPKIKDVLMISLSPIVTCVVVDVSEDDPDVQISWFVN | | | | | |
| | NVEVHTAQTQTHREDYNSTLRVVSALPIQHQDWMSGKEFKCKVNNKDLPAPIERTISKPKGS | | | | | |
| | VRAPQVYVLPPPEEEMTKKQVTLTCMVTDFMPEDIYVEWTNNGKTELNYKNTEPVLDSDGSY | | | | | |
| | FMYSKLRVEKKNWVERNSYSCSVVHEGLHNHHTTKSFSRTPGK | | | | | |
| 8H1- | 291 | 8H1 VL | 4GS3 | 8H1 VH | IgG2a Hinge | IgG2a |
| VL3 VH- | EIVMTQSPGTLSLSPGESATLSCRASQSVSTTYLAWYQQKPGQAPRLLIYGASSRATGIPDR | | | | | |
| IgG2a | FSGSGSGTDFTLTISRLEPEDFAVYYCQQYGGSRLITFGQGTRLEIKGGGGSGGGGSGGGGS | | | | | |
| | EVQLVESGGGLVQPGGSLRLSCAASGFTFSIYTMSWVRQAPGKGLEWVSAILSDGSTYYADS | | | | | |
| | VEGRFTISRDNSKTTLYLQMNSLTAEDTAVYYCTKRVEGSFRGWGQGTLVTVSSEPRGPTIK | | | | | |
| | PCPPCKCPAPNLLGGPSVFIFPPKIKDVLMISLSPIVTCVVVDVSEDDPDVQISWFVNNVEV | | | | | |
| | HTAQTQTHREDYNSTLRVVSALPIQHQDWMSGKEFKCKVNNKDLPAPIERTISKPKGSVRAP | | | | | |
| | QVYVLPPPEEEMTKKQVTLTCMVTDEMPEDIYVEWTNNGKTELNYKNTEPVLDSDGSYFMYS | | | | | |
| | KLRVEKKNWVERNSYSCSVVHEGLHNHHTTKSFSRTPGK | | | | | |
| 8H1- | 292 | 8H1 VL | 4GS3 | 8H1 VH | 5G Modified IgG2a | IgG2a |
| VL3 VH- | | | | | Hinge | |
| 5GIgG2a | EIVMTQSPGTLSLSPGESATLSCRASQSVSTTYLAWYQQKPGQAPRLLIYGASSRATGIPDR | | | | | |
| | FSGSGSGTDFTLTISRLEPEDFAVYYCQQYGGSRLITFGQGTRLEIKGGGGSGGGGSGGGGS | | | | | |
| | EVQLVESGGGLVQPGGSLRLSCAASGFTFSIYTMSWVRQAPGKGLEWVSAILSDGSTYYADS | | | | | |
| | VEGRFTISRDNSKTTLYLQMNSLTAEDTAVYYCTKRVEGSFRGWGQGTLVTVSSGGGGGEPR | | | | | |
| | GPTIKPCPPCKCPAPNLLGGPSVFIFPPKIKDVLMISLSPIVTCVVVDVSEDDPDVQISWFV | | | | | |
| | NNVEVHTAQTQTHREDYNSTLRVVSALPIQHQDWMSGKEFKCKVNNKDLPAPIERTISKPKG | | | | | |
| | SVRAPQVYVLPPPEEEMTKKQVTLTCMVTDFMPEDIYVEWTNNGKTELNYKNTEPVLDSDGS | | | | | |
| | YFMYSKLRVEKKNWVERNSYSCSVVHEGLHNHHTTKSFSRTPGK | | | | | |
| 8H1- | 293 | 8H1 VL | 4GS3 | 8H1 VH | 9G Modified IgG2a | IgG2a |
| VL3 VH- | | | | | Hinge | |
| 9GIgG2a | EIVMTQSPGTLSLSPGESATLSCRASQSVSTTYLAWYQQKPGQAPRLLIYGASSRATGIPDR | | | | | |
| | FSGSGSGTDFTLTISRLEPEDFAVYYCQQYGGSRLITFGQGTRLEIKGGGGSGGGGSGGGGS | | | | | |
| | EVQLVESGGGLVQPGGSLRLSCAASGFTFSIYTMSWVRQAPGKGLEWVSAILSDGSTYYADS | | | | | |
| | VEGRFTISRDNSKTTLYLQMNSLTAEDTAVYYCTKRVEGSFRGWGQGTLVTVSSGGGGGGGG | | | | | |
| | GEPRGPTIKPCPPCKCPAPNLLGGPSVFIFPPKIKDVLMISLSPIVTCVVVDVSEDDPDVQI | | | | | |
| | SWFVNNVEVHTAQTQTHREDYNSTLRVVSALPIQHQDWMSGKEFKCKVNNKDLPAPIERTIS | | | | | |
| | KPKGSVRAPQVYVLPPPEEEMTKKQVTLTCMVTDFMPEDIYVEWTNNGKTELNYKNTEPVLD | | | | | |
| | SDGSYFMYSKLRVEKKNWVERNSYSCSVVHEGLHNHHTTKSFSRTPGK | | | | | |
| 8H1- | 294 | 8H1 VL | 4GS4 | 8H1 VH | IgG2a Hinge | IgG2a |
| VL4VH- | | | | | | |
| IgG2a | EIVMTQSPGTLSLSPGESATLSCRASQSVSTTYLAWYQQKPGQAPRLLIYGASSRATGIPDR | | | | | |
| | FSGSGSGTDFTLTISRLEPEDFAVYYCQQYGGSRLITFGQGTRLEIKGGGGSGGGGSGGGGS | | | | | |
| | GGGGSEVQLVESGGGLVQPGGSLRLSCAASGFTFSIYTMSWVRQAPGKGLEWVSAILSDGST | | | | | |
| | YYADSVEGRFTISRDNSKTTLYLQMNSLTAEDTAVYYCTKRVEGSFRGWGQGTLVTVSSEPR | | | | | |
| | GPTIKPCPPCKCPAPNLLGGPSVFIFPPKIKDVLMISLSPIVTCVVVDVSEDDPDVQISWFV | | | | | |
| | NNVEVHTAQTQTHREDYNSTLRVVSALPIQHQDWMSGKEFKCKVNNKDLPAPIERTISKPKG | | | | | |
| | SVRAPQVYVLPPPEEEMTKKQVTLTCMVTDFMPEDIYVEWTNNGKTELNYKNTEPVLDSDGS | | | | | |
| | YFMYSKLRVEKKNWVERNSYSCSVVHEGLHNHHTTKSFSRTPGK | | | | | |
| 8H1- | 295 | 8H1 VL | 4GS4 | 8H1 VH | 5G Modified IgG2a | IgG2a |
| VL4VH- | | | | | Hinge | |
| 5GIgG2a | EIVMTQSPGTLSLSPGESATLSCRASQSVSTTYLAWYQQKPGQAPRLLIYGASSRATGIPDR | | | | | |
| | FSGSGSGTDFTLTISRLEPEDFAVYYCQQYGGSRLITFGQGTRLEIKGGGGSGGGGSGGGGS | | | | | |
| | GGGGSEVQLVESGGGLVQPGGSLRLSCAASGFTFSIYTMSWVRQAPGKGLEWVSAILSDGST | | | | | |
| | YYADSVEGRFTISRDNSKTTLYLQMNSLTAEDTAVYYCTKRVEGSFRGWGQGTLVTVSSGGG | | | | | |
| | GGEPRGPTIKPCPPCKCPAPNLLGGPSVFIFPPKIKDVLMISLSPIVTCVVVDVSEDDPDVQ | | | | | |
| | ISWFVNNVEVHTAQTQTHREDYNSTLRVVSALPIQHQDWMSGKEFKCKVNNKDLPAPIERTI | | | | | |
| | SKPKGSVRAPQVYVLPPPEEEMTKKQVTLTCMVTDEMPEDIYVEWTNNGKTELNYKNTEPVL | | | | | |
| | DSDGSYFMYSKLRVEKKNWVERNSYSCSVVHEGLHNHHTTKSFSRTPGK | | | | | |
| 8H1- | 296 | 8H1 VL | 4GS4 | 8H1 VH | 9G Modified IgG2a | IgG2a |
| VL4VH- | | | | | Hinge | |

| | |
|---|---|
| 9GIgG2a | EIVMTQSPGTLSLSPGESATLSCRASQSVSTTYLAWYQQKPGQAPRLLIYGASSRATGIPDR |
| | FSGSGSGTDFTLTISRLEPEDFAVYYCQQYGGSRLITFGQGTRLEIKGGGGSGGGGSGGGGS |
| | GGGGSEVQLVESGGGLVQPGGSLRLSCAASGFTFSIYTMSWVRQAPGKGLEWVSAILSDGST |
| | YYADSVEGRFTISRDNSKTTLYLQMNSLTAEDTAVYYCTKRVEGSFRGWGQGTLVTVSSGGG |
| | GGGGGGEPRGPTIKPCPPCKCPAPNLLGGPSVFIFPPKIKDVLMISLSPIVTCVVVDVSEDD |
| | PDVQISWFVNNVEVHTAQTQTHREDYNSTLRVVSALPIQHQDWMSGKEFKCKVNNKDLPAPI |
| | ERTISKPKGSVRAPQVYVLPPPEEEMTKKQVTLTCMVTDEMPEDIYVEWTNNGKTELNYKNT |
| | EPVLDSDGSYFMYSKLRVEKKNWVERNSYSCSVVHEGLHNHHTTKSFSRTPGK |

[0382] Component parts, with the amino acid sequences provided in Table 11A were arranged to construct encoding various exemplary ScFv polypeptides, the amino acid sequences of which are provided in Table 11C. Nucleic acid sequences (see Table 11D for components) encoding the ScFv polypeptides and Fc domains were cloned into Cis plasmids for testing and for making rAAV (see Table 11E for ScFv-Fc transgenes).

TABLE 11C
Exemplary scFv Amino Acid Sequences

| | ScFv | | | |
|---|---|---|---|---|
| ScFv | SEQ ID | | Linker | |
| Name | NO: | VH or VL | (4GS)ₓ | VL or VH |
| 8H1- | 297 | 8H1 VH | 4GS2 | 8H1 VL |
| VH2VL | EVQLVESGGGLVQPGGSLRLSCAASGFTFSIYTMSWVRQAPGKGLEWVSAILSDGSTYYADSV | | | |
| | EGRFTISRDNSKTTLYLQMNSLTAEDTAVYYCTKRVEGSFRGWGQGTLVTVSSGGGGSGGGGS | | | |
| | EIVMTQSPGTLSLSPGESATLSCRASQSVSTTYLAWYQQKPGQAPRLLIYGASSRATGIPDRF | | | |
| | SGSGSGTDFTLTISRLEPEDFAVYYCQQYGGSRLITFGQGTRLEIK | | | |
| 8H1- | 298 | 8H1 VH | 4GS3 | 8H1 VL |
| VH3VL | EVQLVESGGGLVQPGGSLRLSCAASGFTFSIYTMSWVRQAPGKGLEWVSAILSDGSTYYADSV | | | |
| | EGRFTISRDNSKTTLYLQMNSLTAEDTAVYYCTKRVEGSFRGWGQGTLVTVSSGGGGSGGGGS | | | |
| | GGGGSEIVMTQSPGTLSLSPGESATLSCRASQSVSTTYLAWYQQKPGQAPRLLIYGASSRATG | | | |
| | IPDRFSGSGSGTDFTLTISRLEPEDFAVYYCQQYGGSRLITFGQGTRLEIK | | | |
| 8H1- | 299 | 8H1 VH | 4GS4 | 8H1 VL |
| VH4VL | EVQLVESGGGLVQPGGSLRLSCAASGFTFSIYTMSWVRQAPGKGLEWVSAILSDGSTYYADSV | | | |
| | EGRFTISRDNSKTTLYLQMNSLTAEDTAVYYCTKRVEGSFRGWGQGTLVTVSSGGGGSGGGGS | | | |
| | GGGGSGGGGSEIVMTQSPGTLSLSPGESATLSCRASQSVSTTYLAWYQQKPGQAPRLLIYGAS | | | |
| | SRATGIPDRFSGSGSGTDFTLTISRLEPEDFAVYYCQQYGGSRLITFGQGTRLEIK | | | |
| 31B6- | 300 | 31B6 VH | 4GS2 | 31B6 VL |
| VH2VL | EVQLLQSGGGVVQPGGSLRLSCEASGFTFSSYSMHWVRQAPGKGLEWLTLISYNGVNKYYAKS | | | |
| | VKGRFAISRDDSKSTLFLQMNSLTTDDTAVYYCARCPIPRAASYRNGDNYFEFGQGTLVTVSS | | | |
| | GGGGSGGGGSQAVVTQEPSLSVSPGGTVTLTCALSSASVSTSSYPSWYQQTPGQPPRMLIHNT | | | |
| | DTRSSGVPDRFSGSILGKKAALTITGAQADDESDYYCVVYLGNGFWVFGGGTKLTVL | | | |
| 31B6- | 301 | 31B6 VH | 4GS3 | 31B6 VL |
| VH3VL | EVQLLQSGGGVVQPGGSLRLSCEASGFTFSSYSMHWVRQAPGKGLEWLTLISYNGVNKYYAKS | | | |
| | VKGRFAISRDDSKSTLFLQMNSLTTDDTAVYYCARCPIPRAASYRNGDNYFEFGQGTLVTVSS | | | |
| | GGGGGGGGSGGGGSQAVVTQEPSLSVSPGGTVTLTCALSSASVSTSSYPSWYQQTPGQPPRM | | | |
| | LIHNTDTRSSGVPDRFSGSILGKKAALTITGAQADDESDYYCVVYLGNGFWVFGGGTKLTVL | | | |
| 31B6- | 302 | 31B6 VH | 4GS4 | 31B6 VL |
| VH4VL | EVQLLQSGGGVVQPGGSLRLSCEASGFTFSSYSMHWVRQAPGKGLEWLTLISYNGVNKYYAKS | | | |
| | VKGRFAISRDDSKSTLFLQMNSLTTDDTAVYYCARCPIPRAASYRNGDNYFEFGQGTLVTVSS | | | |
| | GGGGSGGGGSGGGGSGGGGSQAVVTQEPSLSVSPGGTVTLTCALSSASVSTSSYPSWYQQTPG | | | |
| | QPPRMLIHNTDTRSSGVPDRFSGSILGKKAALTITGAQADDESDYYCVVYLGNGFWVFGGGTK | | | |
| | LTVL | | | |
| 4P3- | 303 | 4P3 VH | 4GS2 | 4P3 VL |
| VH2VL | EVQLVQSGAEVKKPGESLKISCKVSGYDFSKYWIGWVRQMPGKGLEWMGLIYPGDSDTRYSPS | | | |
| | LEGQVSISADKSISAAYLQFSSLKASDSAMYYCVRKGYSAYLGGWFDPWGQGTLVTVSSGGGG | | | |
| | SGGGGSDIQLTQSPDSLAASLGERVTINCRSSQNIFYNSNNKNFLAWYQQKAGQSPKLLIYWA | | | |
| | STRESGVPDRFSGSGSGTDFTLTISGLQAGDVAVYFCQQYFTDAPTFGGGTKVEIK | | | |
| 4P3- | 304 | 4P3 VH | 4GS3 | 4P3 VL |
| VH3VL | EVQLVQSGAEVKKPGESLKISCKVSGYDFSKYWIGWVRQMPGKGLEWMGLIYPGDSDTRYSPS | | | |
| | LEGQVSISADKSISAAYLQFSSLKASDSAMYYCVRKGYSAYLGGWFDPWGQGTLVTVSSGGGG | | | |
| | SGGGGSGGGGSDIQLTQSPDSLAASLGERVTINCRSSQNIFYNSNNKNFLAWYQQKAGQSPKL | | | |
| | LIYWASTRESGVPDRFSGSGSGTDFTLTISGLQAGDVAVYFCQQYFTDAPTFGGGTKVEIK | | | |
| 4P3- | 305 | 4P3 VH | 4GS4 | 4P3 VL |

| | |
|---|---|
| VH4VL | EVQLVQSGAEVKKPGESLKISCKVSGYDESKYWIGWVRQMPGKGLEWMGLIYPGDSDTRYSPS |
| | LEGQVSISADKSISAAYLQFSSLKASDSAMYYCVRKGYSAYLGGWFDPWGQGTLVTVSSGGGG |
| | SGGGGSGGGGSGGGGSDIQLTQSPDSLAASLGERVTINCRSSQNIFYNSNNKNFLAWYQQKAG |
| | QSPKLLIYWASTRESGVPDRFSGSGSGTDFTLTISGLQAGDVAVYFCQQYFTDAPTFGGGTKV |
| | EIK |

[0383] Nucleic acid sequences encoding the ScFv-Fc polypeptides were cloned into Cis plasmids for testing and for making rAAV. Component parts, exemplary nucleotide sequence of which are listed in Table 11D were arranged to construct various ScFv-Fc polypeptides listed in Table 11B.

TABLE 11D
ScFv and ScFv-Fc Component Nucleic Acid Sequences

| | SEQ | |
|---|---|---|
| Name | ID NO: | Nucleotide Sequence |
| 4P3 VH | 306 | GAGGTGCAGCTGGTGCAGTCTGGGGCTGAAGTGAAGAAGCCTGGGGAGAGCCTGA |
| | | AGATCAGCTGCAAAGTGTCTGGCTATGACTTCAGCAAGTACTGGATTGGCTGGGT |
| | | CAGACAGATGCCTGGCAAAGGCCTGGAATGGATGGGACTGATCTACCCTGGGGAC |
| | | TCTGACACCAGATACAGCCCTAGCCTGGAAGGCCAGGTGTCCATCTCTGCTGACA |
| | | AGAGCATCTCTGCAGCCTACCTGCAGTTCAGCAGCCTGAAGGCCTCTGACTCTGC |
| | | CATGTACTACTGTGTCAGAAAGGGCTACTCTGCCTACCTTGGAGGATGGTTTGAT |
| | | CCTTGGGGCCAGGGCACACTGGTCACAGTGTCCTCT |
| 4P3 VL | 307 | GACATCCAGCTGACACAGAGCCCTGACAGCCTGGCTGCTTCTCTGGGAGAGAGAG |
| | | TGACCATCAACTGCAGAAGCTCCCAGAACATCTTCTACAACAGCAACAACAAGAA |
| | | CTTCCTGGCCTGGTATCAGCAGAAGGCTGGCCAGTCTCCTAAGCTGCTGATCTAC |
| | | TGGGCCAGCACCAGAGAATCTGGGGTGCCAGATAGATTTTCTGGCAGTGGCTCTG |
| | | GCACAGACTTCACCCTGACAATCAGTGGACTGCAGGCTGGGGATGTTGCTGTGTA |
| | | CTTCTGCCAGCAGTACTTCACAGATGCCCCTACCTTTGGTGGTGGCACCAAGGTG |
| | | GAAATCAAG |
| 31B6 VH | 308 | GAGGTGCAGCTGCTGCAGAGTGGTGGTGGTGTTGTGCAGCCTGGTGGCTCTCTGA |
| | | GACTGTCTTGTGAAGCCTCTGGCTTCACCTTCAGCAGCTACAGCATGCACTGGGT |
| | | CAGACAGGCCCCTGGCAAAGGACTGGAATGGCTGACCCTGATCAGCTACAATGGG |
| | | GTCAACAAGTACTATGCCAAGTCTGTGAAGGGCAGATTTGCCATCAGCAGAGATG |
| | | ACAGCAAGTCTACCCTGTTCCTGCAGATGAACAGCCTGACCACAGATGACACTGC |
| | | TGTGTACTACTGTGCCAGATGTCCCATTCCTAGAGCTGCCAGCTACAGAAATGGG |
| | | GACAACTACTTTGAGTTTGGCCAGGGCACCCTGGTCACAGTGTCCTCT |
| 31B6 VL | 309 | CAGGCTGTGGTCACCCAAGAGCCTAGCCTGTCTGTGTCTCCTGGTGGCACAGTGA |
| | | CACTGACATGTGCCCTGTCCTCTGCCTCTGTGTCTACCAGCAGCTACCCCAGCTG |
| | | GTATCAGCAGACACCTGGCCAGCCTCCAAGAATGCTGATCCACAACACAGACACC |
| | | AGATCCTCTGGGGTGCCAGACAGATTCTCTGGCAGCATCCTGGGCAAGAAGGCTG |
| | | CCCTGACAATCACTGGTGCCCAGGCTGATGATGAGTCTGACTACTACTGTGTGGT |
| | | GTACCTTGGCAATGGCTTCTGGGTGTTTGGTGGTGGCACCAAGCTGACAGTGCTG |
| 8H1 VH | 310 | GAGGTGCAGCTGGTGGAAAGTGGTGGTGGACTGGTTCAGCCTGGTGGCAGCCTGA |
| | | GACTGTCTTGTGCTGCCTCTGGCTTCACCTTCAGCATCTACACCATGAGCTGGGT |
| | | CAGACAGGCTCCTGGCAAAGGCCTGGAATGGGTGTCAGCTATCCTGTCTGATGGC |
| | | AGCACCTACTATGCTGACTCTGTGGAAGGCAGATTCACCATCAGCAGAGACAACA |
| | | GCAAGACCACACTGTACCTGCAGATGAACAGCCTGACAGCTGAGGACACTGCTGT |
| | | GTACTACTGCACCAAGAGAGTGGAAGGCTCCTTCAGAGGCTGGGGACAGGGAACA |
| | | CTGGTCACTGTGTCCTCT |
| 8H1 VL | 311 | GAGATTGTGATGACACAGAGCCCTGGCACACTGTCTCTGAGCCCTGGGGAATCTG |
| | | CCACACTGAGCTGTAGAGCCAGCCAGTCTGTGTCTACCACCTACCTGGCCTGGTA |
| | | TCAGCAGAAGCCTGGACAGGCTCCCAGACTGCTGATCTATGGGGCCTCTTCTAGA |
| | | GCCACAGGCATCCCTGACAGATTTTCTGGCAGTGGCTCTGGCACAGACTTCACCC |
| | | TGACCATCAGCAGACTGGAACCTGAGGACTTTGCTGTGTACTACTGCCAGCAGTA |
| | | TGGTGGCAGCAGGCTGATCACATTTGGCCAGGGCACAAGACTGGAAATCAAG |
| 4GS2 | 312 | GGCGGAGGTGGCAGCGGAGGTGGCGGATCA |
| 4GS3 | 313 | GGTGGAGGCGGTTCAGGCGGAGGTGGCAGCGGCGGTGGAGGGTCG |
| 4GS4 | 314 | GGTGGAGGCGGTTCAGGCGGAGGTGGCAGCGGCGGTGGAGGGTCAGGTGGAGGTG |
| | | GATCA |
| 9G | 315 | GGCGGAGGAGGCGGAGGTGGAGGAGGA |
| IgG2a | 316 | GAGCCTAGAGGCCCCACCATCAAGCCCTGTCCTCCATGCAAGTGTCCTGCTCCTA |
| Hinge/CH2/ | | ACCTGCTTGGAGGCCCCTCTGTGTTCATCTTCCCACCTAAGATCAAGGATGTGCT |
| CH3 | | GATGATCTCTCTGAGCCCCATTGTGACCTGTGTGGTGGTGGATGTGTCTGAGGAT |
| (IgG2a | | GACCCTGATGTGCAGATCTCTTGGTTTGTGAACAATGTGGAAGTGCACACAGCCC |
| Fc) | | AGACACAGACCCACAGAGAGGACTACAACAGCACCCTGAGAGTGGTGTCTGCCCT |
| | | GCCTATCCAGCACCAGGACTGGATGAGTGGCAAAGAGTTCAAGTGCAAAGTGAAC |
| | | AACAAGGACCTGCCTGCTCCAATTGAGAGAACCATCAGCAAGCCCAAGGGCTCTG |
| | | TTAGAGCCCCTCAAGTGTATGTGCTGCCTCCACCTGAGGAAGAGATGACCAAGAA |
| | | ACAAGTGACCCTGACATGCATGGTCACAGACTTCATGCCTGAGGACATCTATGTG |
| | | GAATGGACCAACAATGGCAAGACAGAGCTGAACTACAAGAACACTGAGCCTGTGC |
| | | TGGACTCTGATGGCAGCTACTTCATGTACAGCAAGCTGAGGGTTGAGAAGAAGAA |
| | | CTGGGTTGAGAGAAACAGCTACAGCTGCTCTGTGGTGCATGAGGGCCTGCACAAT |
| | | CACCACACCACCAAGAGCTTCAGCAGAACCCCTGGCAAG |
| | | Hinge is in italics. |
| Human | 344 | GAACCCAAGAGCTGTGACAAGACCCACACCTGTCCTCCATGTCCTGCTCCAGAAC |
| IgG1 Fc | | TGCTTGGAGGCCCTTCTGTGTTCCTGTTTCCTCCAAAGCCTAAGGACACCCTGAT |
| domain | | GATCAGCAGAACCCCTGAAGTGACCTGTGTGGTGGTTGATGTGTCCCATGAGGAC |
| exemplary | | CCAGAAGTGAAGTTCAATTGGTATGTGGATGGGGTTGAAGTGCACAATGCCAAGA |
| nucleotide | | CCAAGCCTAGAGAGGAACAGTACAACTCCACCTACAGAGTGGTGTCTGTGCTGAC |
| sequence | | AGTGCTGCACCAGGACTGGCTGAATGGCAAAGAGTACAAGTGCAAGGTGTCCAAC |
| (CH2-CH3) | | AAGGCCCTGCCTGCTCCTATTGAGAAAACCATCTCCAAGGCCAAGGGCCAGCCAA |
| | | GAGAACCCCAGGTTTACACCCTGCCACCTAGCAGAGAAGAGATGACCAAGAACCA |
| | | GGTGTCCCTGACCTGCCTGGTTAAGGGCTTCTACCCCTCTGACATTGCTGTGGAA |
| | | TGGGAGAGCAATGGCCAGCCTGAAAACAACTACAAGACAACCCCTCCTGTGCTGG |
| | | ACTCAGATGGCTCATTCTTCCTGTACAGCAAGCTGACTGTGGACAAGTCCAGGTG |
| | | GCAGCAGGGAAATGTGTTCAGCTGCTCTGTGATGCATGAGGCCCTGCACAACCAC |
| | | TACACCCAGAAAAGTCTGAGTCTGAGCCCTGGCAAG |
| | | Hinge is in italics. |

TABLE 11E
Nucleotide sequences encoding ScFv-Fcs

| | ScFv-Fc | | | | | |
|---|---|---|---|---|---|---|
| | Transgene | | | | IgG hinge or | |
| ScFv-Fc | SEQ ID | | Linker | | Glycine Modified | IgG |
| Name | NO: | VH or VL | (4GS)ₓ | VL or VH | IgG hinge | CH2/CH3 |
| 4P3- | 317 | 4P3 VH | 4GS2 | 4P3 VL | 9G Modified IgG2a | IgG2a |
| VH2VL- | | | | | Hinge | |
| 9GIgG2a | GAGGTGCAGCTGGTGCAGTCTGGGGCTGAAGTGAAGAAGCCTGGGGAGAGCCTGAAGATCAGCT | | | | | |
| | GCAAAGTGTCTGGCTATGACTTCAGCAAGTACTGGATTGGCTGGGTCAGACAGATGCCTGGCAA | | | | | |
| | AGGCCTGGAATGGATGGGACTGATCTACCCTGGGGACTCTGACACCAGATACAGCCCTAGCCTG | | | | | |
| | GAAGGCCAGGTGTCCATCTCTGCTGACAAGAGCATCTCTGCAGCCTACCTGCAGTTCAGCAGCC | | | | | |
| | TGAAGGCCTCTGACTCTGCCATGTACTACTGTGTCAGAAAGGGCTACTCTGCCTACCTTGGAGG | | | | | |
| | ATGGTTTGATCCTTGGGGCCAGGGCACACTGGTCACAGTGTCCTCTGGCGGAGGTGGCAGCGGA | | | | | |
| | GGTGGCGGATCAGACATCCAGCTGACACAGAGCCCTGACAGCCTGGCTGCTTCTCTGGGAGAGA | | | | | |
| | GAGTGACCATCAACTGCAGAAGCTCCCAGAACATCTTCTACAACAGCAACAACAAGAACTTCCT | | | | | |
| | GGCCTGGTATCAGCAGAAGGCTGGCCAGTCTCCTAAGCTGCTGATCTACTGGGCCAGCACCAGA | | | | | |
| | GAATCTGGGGTGCCAGATAGATTTTCTGGCAGTGGCTCTGGCACAGACTTCACCCTGACAATCA | | | | | |
| | GTGGACTGCAGGCTGGGGATGTTGCTGTGTACTTCTGCCAGCAGTACTTCACAGATGCCCCTAC | | | | | |
| | CTTTGGTGGTGGCACCAAGGTGGAAATCAAGGGCGGAGGAGGCGGAGGTGGAGGAGGAGAGCCT | | | | | |
| | AGAGGCCCCACCATCAAGCCCTGTCCTCCATGCAAGTGTCCTGCTCCTAACCTGCTTGGAGGCC | | | | | |
| | CCTCTGTGTTCATCTTCCCACCTAAGATCAAGGATGTGCTGATGATCTCTCTGAGCCCCATTGT | | | | | |
| | GACCTGTGTGGTGGTGGATGTGTCTGAGGATGACCCTGATGTGCAGATCTCTTGGTTTGTGAAC | | | | | |
| | AATGTGGAAGTGCACACAGCCCAGACACAGACCCACAGAGAGGACTACAACAGCACCCTGAGAG | | | | | |
| | TGGTGTCTGCCCTGCCTATCCAGCACCAGGACTGGATGAGTGGCAAAGAGTTCAAGTGCAAAGT | | | | | |
| | GAACAACAAGGACCTGCCTGCTCCAATTGAGAGAACCATCAGCAAGCCCAAGGGCTCTGTTAGA | | | | | |
| | GCCCCTCAAGTGTATGTGCTGCCTCCACCTGAGGAAGAGATGACCAAGAAACAAGTGACCCTGA | | | | | |
| | CATGCATGGTCACAGACTTCATGCCTGAGGACATCTATGTGGAATGGACCAACAATGGCAAGAC | | | | | |
| | AGAGCTGAACTACAAGAACACTGAGCCTGTGCTGGACTCTGATGGCAGCTACTTCATGTACAGC | | | | | |
| | AAGCTGAGGGTTGAGAAGAAGAACTGGGTTGAGAGAAACAGCTACAGCTGCTCTGTGGTGCATG | | | | | |
| | AGGGCCTGCACAATCACCACACCACCAAGAGCTTCAGCAGAACCCCTGGCAAG | | | | | |
| 4P3- | 345 | 4P3 VH | 4GS2 | 4P3 VL | 9G Modified IgG1 | IgG1 |
| VH2VL- | | | | | Hinge | |
| 9GIgG1 | GAGGTGCAGCTGGTGCAGTCTGGGGCTGAAGTGAAGAAGCCTGGGGAGAGCCTGAAGATCAGCT | | | | | |
| | GCAAAGTGTCTGGCTATGACTTCAGCAAGTACTGGATTGGCTGGGTCAGACAGATGCCTGGCAA | | | | | |
| | AGGCCTGGAATGGATGGGACTGATCTACCCTGGGGACTCTGACACCAGATACAGCCCTAGCCTG | | | | | |
| | GAAGGCCAGGTGTCCATCTCTGCTGACAAGAGCATCTCTGCAGCCTACCTGCAGTTCAGCAGCC | | | | | |
| | TGAAGGCCTCTGACTCTGCCATGTACTACTGTGTCAGAAAGGGCTACTCTGCCTACCTTGGAGG | | | | | |
| | ATGGTTTGATCCTTGGGGCCAGGGCACACTGGTCACAGTGTCCTCTGGCGGAGGTGGCAGCGGA | | | | | |
| | GGTGGCGGATCAGACATCCAGCTGACACAGAGCCCTGACAGCCTGGCTGCTTCTCTGGGAGAGA | | | | | |
| | GAGTGACCATCAACTGCAGAAGCTCCCAGAACATCTTCTACAACAGCAACAACAAGAACTTCCT | | | | | |
| | GGCCTGGTATCAGCAGAAGGCTGGCCAGTCTCCTAAGCTGCTGATCTACTGGGCCAGCACCAGA | | | | | |
| | GAATCTGGGGTGCCAGATAGATTTTCTGGCAGTGGCTCTGGCACAGACTTCACCCTGACAATCA | | | | | |
| | GTGGACTGCAGGCTGGGGATGTTGCTGTGTACTTCTGCCAGCAGTACTTCACAGATGCCCCTAC | | | | | |
| | CTTTGGTGGTGGCACCAAGGTGGAAATCAAGGGCGGAGGAGGCGGAGGTGGAGGAGGAGAACCC | | | | | |
| | AAGAGCTGTGACAAGACCCACACCTGTCCTCCATGTCCTGCTCCAGAACTGCTTGGAGGCCCTT | | | | | |
| | CTGTGTTCCTGTTTCCTCCAAAGCCTAAGGACACCCTGATGATCAGCAGAACCCCTGAAGTGAC | | | | | |
| | CTGTGTGGTGGTTGATGTGTCCCATGAGGACCCAGAAGTGAAGTTCAATTGGTATGTGGATGGG | | | | | |
| | GTTGAAGTGCACAATGCCAAGACCAAGCCTAGAGAGGAACAGTACAACTCCACCTACAGAGTGG | | | | | |
| | TGTCTGTGCTGACAGTGCTGCACCAGGACTGGCTGAATGGCAAAGAGTACAAGTGCAAGGTGTC | | | | | |
| | CAACAAGGCCCTGCCTGCTCCTATTGAGAAAACCATCTCCAAGGCCAAGGGCCAGCCAAGAGAA | | | | | |
| | CCCCAGGTTTACACCCTGCCACCTAGCAGAGAAGAGATGACCAAGAACCAGGTGTCCCTGACCT | | | | | |
| | GCCTGGTTAAGGGCTTCTACCCCTCTGACATTGCTGTGGAATGGGAGAGCAATGGCCAGCCTGA | | | | | |
| | AAACAACTACAAGACAACCCCTCCTGTGCTGGACTCAGATGGCTCATTCTTCCTGTACAGCAAG | | | | | |
| | CTGACTGTGGACAAGTCCAGGTGGCAGCAGGGAAATGTGTTCAGCTGCTCTGTGATGCATGAGG | | | | | |
| | CCCTGCACAACCACTACACCCAGAAAAGTCTGAGTCTGAGCCCTGGCAAG | | | | | |
| 4P3- | 318 | 4P3 VH | 4GS3 | 4P3 VL | 9G Modified IgG2a | IgG2a |
| VH3VL- | | | | | Hinge | |
| 9GIgG2a | GAGGTGCAGCTGGTGCAGTCTGGGGCTGAAGTGAAGAAGCCTGGGGAGAGCCTGAAGATCAGCT | | | | | |
| | GCAAAGTGTCTGGCTATGACTTCAGCAAGTACTGGATTGGCTGGGTCAGACAGATGCCTGGCAA | | | | | |
| | AGGCCTGGAATGGATGGGACTGATCTACCCTGGGGACTCTGACACCAGATACAGCCCTAGCCTG | | | | | |
| | GAAGGCCAGGTGTCCATCTCTGCTGACAAGAGCATCTCTGCAGCCTACCTGCAGTTCAGCAGCC | | | | | |
| | TGAAGGCCTCTGACTCTGCCATGTACTACTGTGTCAGAAAGGGCTACTCTGCCTACCTTGGAGG | | | | | |
| | ATGGTTTGATCCTTGGGGCCAGGGCACACTGGTCACAGTGTCCTCTGGTGGAGGCGGTTCAGGC | | | | | |
| | GGAGGTGGCAGCGGCGGTGGAGGGTCGGACATCCAGCTGACACAGAGCCCTGACAGCCTGGCTG | | | | | |
| | CTTCTCTGGGAGAGAGAGTGACCATCAACTGCAGAAGCTCCCAGAACATCTTCTACAACAGCAA | | | | | |
| | CAACAAGAACTTCCTGGCCTGGTATCAGCAGAAGGCTGGCCAGTCTCCTAAGCTGCTGATCTAC | | | | | |
| | TGGGCCAGCACCAGAGAATCTGGGGTGCCAGATAGATTTTCTGGCAGTGGCTCTGGCACAGACT | | | | | |
| | TCACCCTGACAATCAGTGGACTGCAGGCTGGGGATGTTGCTGTGTACTTCTGCCAGCAGTACTT | | | | | |
| | CACAGATGCCCCTACCTTTGGTGGTGGCACCAAGGTGGAAATCAAGGGCGGAGGAGGCGGAGGT | | | | | |
| | GGAGGAGGAGAGCCTAGAGGCCCCACCATCAAGCCCTGTCCTCCATGCAAGTGTCCTGCTCCTA | | | | | |
| | ACCTGCTTGGAGGCCCCTCTGTGTTCATCTTCCCACCTAAGATCAAGGATGTGCTGATGATCTC | | | | | |
| | TCTGAGCCCCATTGTGACCTGTGTGGTGGTGGATGTGTCTGAGGATGACCCTGATGTGCAGATC | | | | | |
| | TCTTGGTTTGTGAACAATGTGGAAGTGCACACAGCCCAGACACAGACCCACAGAGAGGACTACA | | | | | |
| | ACAGCACCCTGAGAGTGGTGTCTGCCCTGCCTATCCAGCACCAGGACTGGATGAGTGGCAAAGA | | | | | |
| | GTTCAAGTGCAAAGTGAACAACAAGGACCTGCCTGCTCCAATTGAGAGAACCATCAGCAAGCCC | | | | | |
| | AAGGGCTCTGTTAGAGCCCCTCAAGTGTATGTGCTGCCTCCACCTGAGGAAGAGATGACCAAGA | | | | | |
| | AACAAGTGACCCTGACATGCATGGTCACAGACTTCATGCCTGAGGACATCTATGTGGAATGGAC | | | | | |
| | CAACAATGGCAAGACAGAGCTGAACTACAAGAACACTGAGCCTGTGCTGGACTCTGATGGCAGC | | | | | |
| | TACTTCATGTACAGCAAGCTGAGGGTTGAGAAGAAGAACTGGGTTGAGAGAAACAGCTACAGCT | | | | | |
| | GCTCTGTGGTGCATGAGGGCCTGCACAATCACCACACCACCAAGAGCTTCAGCAGAACCCCTGG | | | | | |
| | CAAG | | | | | |
| 4P3- | 319 | 4P3 VH | 4GS4 | 4P3 VL | 9G Modified IgG2a | IgG2a |
| VH4VL- | | | | | Hinge | |
| 9GIgG2a | GAGGTGCAGCTGGTGCAGTCTGGGGCTGAAGTGAAGAAGCCTGGGGAGAGCCTGAAGATCAGCT | | | | | |
| | GCAAAGTGTCTGGCTATGACTTCAGCAAGTACTGGATTGGCTGGGTCAGACAGATGCCTGGCAA | | | | | |
| | AGGCCTGGAATGGATGGGACTGATCTACCCTGGGGACTCTGACACCAGATACAGCCCTAGCCTG | | | | | |
| | GAAGGCCAGGTGTCCATCTCTGCTGACAAGAGCATCTCTGCAGCCTACCTGCAGTTCAGCAGCC | | | | | |
| | TGAAGGCCTCTGACTCTGCCATGTACTACTGTGTCAGAAAGGGCTACTCTGCCTACCTTGGAGG | | | | | |
| | ATGGTTTGATCCTTGGGGCCAGGGCACACTGGTCACAGTGTCCTCTGGTGGAGGCGGTTCAGGC | | | | | |
| | GGAGGTGGCAGCGGCGGTGGAGGGTCAGGTGGAGGTGGATCAGACATCCAGCTGACACAGAGCC | | | | | |
| | CTGACAGCCTGGCTGCTTCTCTGGGAGAGAGAGTGACCATCAACTGCAGAAGCTCCCAGAACAT | | | | | |
| | CTTCTACAACAGCAACAACAAGAACTTCCTGGCCTGGTATCAGCAGAAGGCTGGCCAGTCTCCT | | | | | |
| | AAGCTGCTGATCTACTGGGCCAGCACCAGAGAATCTGGGGTGCCAGATAGATTTTCTGGCAGTG | | | | | |
| | GCTCTGGCACAGACTTCACCCTGACAATCAGTGGACTGCAGGCTGGGGATGTTGCTGTGTACTT | | | | | |
| | CTGCCAGCAGTACTTCACAGATGCCCCTACCTTTGGTGGTGGCACCAAGGTGGAAATCAAGGGC | | | | | |
| | GGAGGAGGCGGAGGTGGAGGAGGAGAGCCTAGAGGCCCCACCATCAAGCCCTGTCCTCCATGCA | | | | | |
| | AGTGTCCTGCTCCTAACCTGCTTGGAGGCCCCTCTGTGTTCATCTTCCCACCTAAGATCAAGGA | | | | | |
| | TGTGCTGATGATCTCTCTGAGCCCCATTGTGACCTGTGTGGTGGTGGATGTGTCTGAGGATGAC | | | | | |
| | CCTGATGTGCAGATCTCTTGGTTTGTGAACAATGTGGAAGTGCACACAGCCCAGACACAGACCC | | | | | |
| | ACAGAGAGGACTACAACAGCACCCTGAGAGTGGTGTCTGCCCTGCCTATCCAGCACCAGGACTG | | | | | |
| | GATGAGTGGCAAAGAGTTCAAGTGCAAAGTGAACAACAAGGACCTGCCTGCTCCAATTGAGAGA | | | | | |
| | ACCATCAGCAAGCCCAAGGGCTCTGTTAGAGCCCCTCAAGTGTATGTGCTGCCTCCACCTGAGG | | | | | |
| | AAGAGATGACCAAGAAACAAGTGACCCTGACATGCATGGTCACAGACTTCATGCCTGAGGACAT | | | | | |
| | CTATGTGGAATGGACCAACAATGGCAAGACAGAGCTGAACTACAAGAACACTGAGCCTGTGCTG | | | | | |
| | GACTCTGATGGCAGCTACTTCATGTACAGCAAGCTGAGGGTTGAGAAGAAGAACTGGGTTGAGA | | | | | |
| | GAAACAGCTACAGCTGCTCTGTGGTGCATGAGGGCCTGCACAATCACCACACCACCAAGAGCTT | | | | | |
| | CAGCAGAACCCCTGGCAAG | | | | | |
| 4P3- | 346 | 4P3 VH | 4GS4 | 4P3 VL | 9G Modified IgG1 | IgG1 |
| VH4VL- | | | | | Hinge | |
| 9GIgG1 | GAGGTGCAGCTGGTGCAGTCTGGGGCTGAAGTGAAGAAGCCTGGGGAGAGCCTGAAGATCAGCT | | | | | |
| | GCAAAGTGTCTGGCTATGACTTCAGCAAGTACTGGATTGGCTGGGTCAGACAGATGCCTGGCAA | | | | | |
| | AGGCCTGGAATGGATGGGACTGATCTACCCTGGGGACTCTGACACCAGATACAGCCCTAGCCTG | | | | | |
| | GAAGGCCAGGTGTCCATCTCTGCTGACAAGAGCATCTCTGCAGCCTACCTGCAGTTCAGCAGCC | | | | | |
| | TGAAGGCCTCTGACTCTGCCATGTACTACTGTGTCAGAAAGGGCTACTCTGCCTACCTTGGAGG | | | | | |
| | ATGGTTTGATCCTTGGGGCCAGGGCACACTGGTCACAGTGTCCTCTGGTGGAGGCGGTTCAGGC | | | | | |
| | GGAGGTGGCAGCGGCGGTGGAGGGTCAGGTGGAGGTGGATCAGACATCCAGCTGACACAGAGCC | | | | | |
| | CTGACAGCCTGGCTGCTTCTCTGGGAGAGAGAGTGACCATCAACTGCAGAAGCTCCCAGAACAT | | | | | |
| | CTTCTACAACAGCAACAACAAGAACTTCCTGGCCTGGTATCAGCAGAAGGCTGGCCAGTCTCCT | | | | | |
| | AAGCTGCTGATCTACTGGGCCAGCACCAGAGAATCTGGGGTGCCAGATAGATTTTCTGGCAGTG | | | | | |
| | GCTCTGGCACAGACTTCACCCTGACAATCAGTGGACTGCAGGCTGGGGATGTTGCTGTGTACTT | | | | | |
| | CTGCCAGCAGTACTTCACAGATGCCCCTACCTTTGGTGGTGGCACCAAGGTGGAAATCAAGGGC | | | | | |
| | GGAGGAGGCGGAGGTGGAGGAGGAGAACCCAAGAGCTGTGACAAGACCCACACCTGTCCTCCAT | | | | | |
| | GTCCTGCTCCAGAACTGCTTGGAGGCCCTTCTGTGTTCCTGTTTCCTCCAAAGCCTAAGGACAC | | | | | |
| | CCTGATGATCAGCAGAACCCCTGAAGTGACCTGTGTGGTGGTTGATGTGTCCCATGAGGACCCA | | | | | |
| | GAAGTGAAGTTCAATTGGTATGTGGATGGGGTTGAAGTGCACAATGCCAAGACCAAGCCTAGAG | | | | | |
| | AGGAACAGTACAACTCCACCTACAGAGTGGTGTCTGTGCTGACAGTGCTGCACCAGGACTGGCT | | | | | |
| | GAATGGCAAAGAGTACAAGTGCAAGGTGTCCAACAAGGCCCTGCCTGCTCCTATTGAGAAAACC | | | | | |
| | ATCTCCAAGGCCAAGGGCCAGCCAAGAGAACCCCAGGTTTACACCCTGCCACCTAGCAGAGAAG | | | | | |
| | AGATGACCAAGAACCAGGTGTCCCTGACCTGCCTGGTTAAGGGCTTCTACCCCTCTGACATTGC | | | | | |
| | TGTGGAATGGGAGAGCAATGGCCAGCCTGAAAACAACTACAAGACAACCCCTCCTGTGCTGGAC | | | | | |
| | TCAGATGGCTCATTCTTCCTGTACAGCAAGCTGACTGTGGACAAGTCCAGGTGGCAGCAGGGAA | | | | | |
| | ATGTGTTCAGCTGCTCTGTGATGCATGAGGCCCTGCACAACCACTACACCCAGAAAAGTCTGAG | | | | | |
| | TCTGAGCCCTGGCAAG | | | | | |
| 4P3- | 320 | 4P3 VL | 4GS2 | 4P3 VH | 9G Modified IgG2a | IgG2a |
| VL2VH- | | | | | Hinge | |
| 9GIgG2a | GACATCCAGCTGACACAGAGCCCTGACAGCCTGGCTGCTTCTCTGGGAGAGAGAGTGACCATCA | | | | | |
| | ACTGCAGAAGCTCCCAGAACATCTTCTACAACAGCAACAACAAGAACTTCCTGGCCTGGTATCA | | | | | |
| | GCAGAAGGCTGGCCAGTCTCCTAAGCTGCTGATCTACTGGGCCAGCACCAGAGAATCTGGGGTG | | | | | |
| | CCAGATAGATTTTCTGGCAGTGGCTCTGGCACAGACTTCACCCTGACAATCAGTGGACTGCAGG | | | | | |
| | CTGGGGATGTTGCTGTGTACTTCTGCCAGCAGTACTTCACAGATGCCCCTACCTTTGGTGGTGG | | | | | |
| | CACCAAGGTGGAAATCAAGGGCGGAGGTGGCAGCGGAGGTGGCGGATCAGAGGTGCAGCTGGTG | | | | | |
| | CAGTCTGGGGCTGAAGTGAAGAAGCCTGGGGAGAGCCTGAAGATCAGCTGCAAAGTGTCTGGCT | | | | | |
| | ATGACTTCAGCAAGTACTGGATTGGCTGGGTCAGACAGATGCCTGGCAAAGGCCTGGAATGGAT | | | | | |
| | GGGACTGATCTACCCTGGGGACTCTGACACCAGATACAGCCCTAGCCTGGAAGGCCAGGTGTCC | | | | | |
| | ATCTCTGCTGACAAGAGCATCTCTGCAGCCTACCTGCAGTTCAGCAGCCTGAAGGCCTCTGACT | | | | | |
| | CTGCCATGTACTACTGTGTCAGAAAGGGCTACTCTGCCTACCTTGGAGGATGGTTTGATCCTTG | | | | | |
| | GGGCCAGGGCACACTGGTCACAGTGTCCTCTGGCGGAGGAGGCGGAGGTGGAGGAGGAGAGCCT | | | | | |
| | AGAGGCCCCACCATCAAGCCCTGTCCTCCATGCAAGTGTCCTGCTCCTAACCTGCTTGGAGGCC | | | | | |
| | CCTCTGTGTTCATCTTCCCACCTAAGATCAAGGATGTGCTGATGATCTCTCTGAGCCCCATTGT | | | | | |
| | GACCTGTGTGGTGGTGGATGTGTCTGAGGATGACCCTGATGTGCAGATCTCTTGGTTTGTGAAC | | | | | |
| | AATGTGGAAGTGCACACAGCCCAGACACAGACCCACAGAGAGGACTACAACAGCACCCTGAGAG | | | | | |
| | TGGTGTCTGCCCTGCCTATCCAGCACCAGGACTGGATGAGTGGCAAAGAGTTCAAGTGCAAAGT | | | | | |
| | GAACAACAAGGACCTGCCTGCTCCAATTGAGAGAACCATCAGCAAGCCCAAGGGCTCTGTTAGA | | | | | |
| | GCCCCTCAAGTGTATGTGCTGCCTCCACCTGAGGAAGAGATGACCAAGAAACAAGTGACCCTGA | | | | | |
| | CATGCATGGTCACAGACTTCATGCCTGAGGACATCTATGTGGAATGGACCAACAATGGCAAGAC | | | | | |
| | AGAGCTGAACTACAAGAACACTGAGCCTGTGCTGGACTCTGATGGCAGCTACTTCATGTACAGC | | | | | |
| | AAGCTGAGGGTTGAGAAGAAGAACTGGGTTGAGAGAAACAGCTACAGCTGCTCTGTGGTGCATG | | | | | |
| | AGGGCCTGCACAATCACCACACCACCAAGAGCTTCAGCAGAACCCCTGGCAAG | | | | | |
| 4P3- | 321 | 4P3 VL | 4GS3 | 4P3 VH | 9G Modified IgG2a | IgG2a |
| VL3 VH- | | | | | Hinge | |
| 9GIgG2a | GACATCCAGCTGACACAGAGCCCTGACAGCCTGGCTGCTTCTCTGGGAGAGAGAGTGACCATCA | | | | | |
| | ACTGCAGAAGCTCCCAGAACATCTTCTACAACAGCAACAACAAGAACTTCCTGGCCTGGTATCA | | | | | |
| | GCAGAAGGCTGGCCAGTCTCCTAAGCTGCTGATCTACTGGGCCAGCACCAGAGAATCTGGGGTG | | | | | |
| | CCAGATAGATTTTCTGGCAGTGGCTCTGGCACAGACTTCACCCTGACAATCAGTGGACTGCAGG | | | | | |
| | CTGGGGATGTTGCTGTGTACTTCTGCCAGCAGTACTTCACAGATGCCCCTACCTTTGGTGGTGG | | | | | |
| | CACCAAGGTGGAAATCAAGGGTGGAGGCGGTTCAGGCGGAGGTGGCAGCGGCGGTGGAGGGTCG | | | | | |
| | GAGGTGCAGCTGGTGCAGTCTGGGGCTGAAGTGAAGAAGCCTGGGGAGAGCCTGAAGATCAGCT | | | | | |
| | GCAAAGTGTCTGGCTATGACTTCAGCAAGTACTGGATTGGCTGGGTCAGACAGATGCCTGGCAA | | | | | |
| | AGGCCTGGAATGGATGGGACTGATCTACCCTGGGGACTCTGACACCAGATACAGCCCTAGCCTG | | | | | |
| | GAAGGCCAGGTGTCCATCTCTGCTGACAAGAGCATCTCTGCAGCCTACCTGCAGTTCAGCAGCC | | | | | |
| | TGAAGGCCTCTGACTCTGCCATGTACTACTGTGTCAGAAAGGGCTACTCTGCCTACCTTGGAGG | | | | | |
| | ATGGTTTGATCCTTGGGGCCAGGGCACACTGGTCACAGTGTCCTCTGGCGGAGGAGGCGGAGGT | | | | | |
| | GGAGGAGGAGAGCCTAGAGGCCCCACCATCAAGCCCTGTCCTCCATGCAAGTGTCCTGCTCCTA | | | | | |
| | ACCTGCTTGGAGGCCCCTCTGTGTTCATCTTCCCACCTAAGATCAAGGATGTGCTGATGATCTC | | | | | |
| | TCTGAGCCCCATTGTGACCTGTGTGGTGGTGGATGTGTCTGAGGATGACCCTGATGTGCAGATC | | | | | |
| | TCTTGGTTTGTGAACAATGTGGAAGTGCACACAGCCCAGACACAGACCCACAGAGAGGACTACA | | | | | |
| | ACAGCACCCTGAGAGTGGTGTCTGCCCTGCCTATCCAGCACCAGGACTGGATGAGTGGCAAAGA | | | | | |
| | GTTCAAGTGCAAAGTGAACAACAAGGACCTGCCTGCTCCAATTGAGAGAACCATCAGCAAGCCC | | | | | |
| | AAGGGCTCTGTTAGAGCCCCTCAAGTGTATGTGCTGCCTCCACCTGAGGAAGAGATGACCAAGA | | | | | |
| | AACAAGTGACCCTGACATGCATGGTCACAGACTTCATGCCTGAGGACATCTATGTGGAATGGAC | | | | | |
| | CAACAATGGCAAGACAGAGCTGAACTACAAGAACACTGAGCCTGTGCTGGACTCTGATGGCAGC | | | | | |
| | TACTTCATGTACAGCAAGCTGAGGGTTGAGAAGAAGAACTGGGTTGAGAGAAACAGCTACAGCT | | | | | |
| | GCTCTGTGGTGCATGAGGGCCTGCACAATCACCACACCACCAAGAGCTTCAGCAGAACCCCTGG | | | | | |
| | CAAG | | | | | |
| 4P3- | 322 | 4P3 VL | 4GS4 | 4P3 VH | 9G Modified IgG2a | IgG2a |
| VL4VH- | | | | | Hinge | |
| 9GIgG2a | GACATCCAGCTGACACAGAGCCCTGACAGCCTGGCTGCTTCTCTGGGAGAGAGAGTGACCATCA | | | | | |
| | ACTGCAGAAGCTCCCAGAACATCTTCTACAACAGCAACAACAAGAACTTCCTGGCCTGGTATCA | | | | | |
| | GCAGAAGGCTGGCCAGTCTCCTAAGCTGCTGATCTACTGGGCCAGCACCAGAGAATCTGGGGTG | | | | | |
| | CCAGATAGATTTTCTGGCAGTGGCTCTGGCACAGACTTCACCCTGACAATCAGTGGACTGCAGG | | | | | |
| | CTGGGGATGTTGCTGTGTACTTCTGCCAGCAGTACTTCACAGATGCCCCTACCTTTGGTGGTGG | | | | | |
| | CACCAAGGTGGAAATCAAGGGTGGAGGCGGTTCAGGCGGAGGTGGCAGCGGCGGTGGAGGGTCA | | | | | |
| | GGTGGAGGTGGATCAGAGGTGCAGCTGGTGCAGTCTGGGGCTGAAGTGAAGAAGCCTGGGGAGA | | | | | |
| | GCCTGAAGATCAGCTGCAAAGTGTCTGGCTATGACTTCAGCAAGTACTGGATTGGCTGGGTCAG | | | | | |
| | ACAGATGCCTGGCAAAGGCCTGGAATGGATGGGACTGATCTACCCTGGGGACTCTGACACCAGA | | | | | |
| | TACAGCCCTAGCCTGGAAGGCCAGGTGTCCATCTCTGCTGACAAGAGCATCTCTGCAGCCTACC | | | | | |
| | TGCAGTTCAGCAGCCTGAAGGCCTCTGACTCTGCCATGTACTACTGTGTCAGAAAGGGCTACTC | | | | | |
| | TGCCTACCTTGGAGGATGGTTTGATCCTTGGGGCCAGGGCACACTGGTCACAGTGTCCTCTGGC | | | | | |
| | GGAGGAGGCGGAGGTGGAGGAGGAGAGCCTAGAGGCCCCACCATCAAGCCCTGTCCTCCATGCA | | | | | |
| | AGTGTCCTGCTCCTAACCTGCTTGGAGGCCCCTCTGTGTTCATCTTCCCACCTAAGATCAAGGA | | | | | |
| | TGTGCTGATGATCTCTCTGAGCCCCATTGTGACCTGTGTGGTGGTGGATGTGTCTGAGGATGAC | | | | | |
| | CCTGATGTGCAGATCTCTTGGTTTGTGAACAATGTGGAAGTGCACACAGCCCAGACACAGACCC | | | | | |
| | ACAGAGAGGACTACAACAGCACCCTGAGAGTGGTGTCTGCCCTGCCTATCCAGCACCAGGACTG | | | | | |
| | GATGAGTGGCAAAGAGTTCAAGTGCAAAGTGAACAACAAGGACCTGCCTGCTCCAATTGAGAGA | | | | | |
| | ACCATCAGCAAGCCCAAGGGCTCTGTTAGAGCCCCTCAAGTGTATGTGCTGCCTCCACCTGAGG | | | | | |
| | AAGAGATGACCAAGAAACAAGTGACCCTGACATGCATGGTCACAGACTTCATGCCTGAGGACAT | | | | | |
| | CTATGTGGAATGGACCAACAATGGCAAGACAGAGCTGAACTACAAGAACACTGAGCCTGTGCTG | | | | | |
| | GACTCTGATGGCAGCTACTTCATGTACAGCAAGCTGAGGGTTGAGAAGAAGAACTGGGTTGAGA | | | | | |
| | GAAACAGCTACAGCTGCTCTGTGGTGCATGAGGGCCTGCACAATCACCACACCACCAAGAGCTT | | | | | |
| | CAGCAGAACCCCTGGCAAG | | | | | |
| 31B6- | 323 | 31B6 VH | 4GS2 | 31B6 VL | 9G Modified IgG2a | IgG2a |
| VH2VL- | | | | | Hinge | |
| 9GIgG2a | GAGGTGCAGCTGCTGCAGAGTGGTGGTGGTGTTGTGCAGCCTGGTGGCTCTCTGAGACTGTCTT | | | | | |
| | GTGAAGCCTCTGGCTTCACCTTCAGCAGCTACAGCATGCACTGGGTCAGACAGGCCCCTGGCAA | | | | | |
| | AGGACTGGAATGGCTGACCCTGATCAGCTACAATGGGGTCAACAAGTACTATGCCAAGTCTGTG | | | | | |
| | AAGGGCAGATTTGCCATCAGCAGAGATGACAGCAAGTCTACCCTGTTCCTGCAGATGAACAGCC | | | | | |
| | TGACCACAGATGACACTGCTGTGTACTACTGTGCCAGATGTCCCATTCCTAGAGCTGCCAGCTA | | | | | |
| | CAGAAATGGGGACAACTACTTTGAGTTTGGCCAGGGCACCCTGGTCACAGTGTCCTCTGGCGGA | | | | | |
| | GGTGGCAGCGGAGGTGGCGGATCACAGGCTGTGGTCACCCAAGAGCCTAGCCTGTCTGTGTCTC | | | | | |
| | CTGGTGGCACAGTGACACTGACATGTGCCCTGTCCTCTGCCTCTGTGTCTACCAGCAGCTACCC | | | | | |
| | CAGCTGGTATCAGCAGACACCTGGCCAGCCTCCAAGAATGCTGATCCACAACACAGACACCAGA | | | | | |
| | TCCTCTGGGGTGCCAGACAGATTCTCTGGCAGCATCCTGGGCAAGAAGGCTGCCCTGACAATCA | | | | | |
| | CTGGTGCCCAGGCTGATGATGAGTCTGACTACTACTGTGTGGTGTACCTTGGCAATGGCTTCTG | | | | | |
| | GGTGTTTGGTGGTGGCACCAAGCTGACAGTGCTGGGCGGAGGAGGCGGAGGTGGAGGAGGAGAG | | | | | |
| | CCTAGAGGCCCCACCATCAAGCCCTGTCCTCCATGCAAGTGTCCTGCTCCTAACCTGCTTGGAG | | | | | |
| | GCCCCTCTGTGTTCATCTTCCCACCTAAGATCAAGGATGTGCTGATGATCTCTCTGAGCCCCAT | | | | | |
| | TGTGACCTGTGTGGTGGTGGATGTGTCTGAGGATGACCCTGATGTGCAGATCTCTTGGTTTGTG | | | | | |
| | AACAATGTGGAAGTGCACACAGCCCAGACACAGACCCACAGAGAGGACTACAACAGCACCCTGA | | | | | |
| | GAGTGGTGTCTGCCCTGCCTATCCAGCACCAGGACTGGATGAGTGGCAAAGAGTTCAAGTGCAA | | | | | |
| | AGTGAACAACAAGGACCTGCCTGCTCCAATTGAGAGAACCATCAGCAAGCCCAAGGGCTCTGTT | | | | | |
| | AGAGCCCCTCAAGTGTATGTGCTGCCTCCACCTGAGGAAGAGATGACCAAGAAACAAGTGACCC | | | | | |
| | TGACATGCATGGTCACAGACTTCATGCCTGAGGACATCTATGTGGAATGGACCAACAATGGCAA | | | | | |
| | GACAGAGCTGAACTACAAGAACACTGAGCCTGTGCTGGACTCTGATGGCAGCTACTTCATGTAC | | | | | |
| | AGCAAGCTGAGGGTTGAGAAGAAGAACTGGGTTGAGAGAAACAGCTACAGCTGCTCTGTGGTGC | | | | | |
| | ATGAGGGCCTGCACAATCACCACACCACCAAGAGCTTCAGCAGAACCCCTGGCAAG | | | | | |
| 31B6- | 347 | 31B6 VH | 4GS2 | 31B6 VL | 9G Modified IgG1 | IgG1 |
| VH2VL- | | | | | Hinge | |
| 9GIgG1 | GAGGTGCAGCTGCTGCAGAGTGGTGGTGGTGTTGTGCAGCCTGGTGGCTCTCTGAGACTGTCTT | | | | | |
| | GTGAAGCCTCTGGCTTCACCTTCAGCAGCTACAGCATGCACTGGGTCAGACAGGCCCCTGGCAA | | | | | |
| | AGGACTGGAATGGCTGACCCTGATCAGCTACAATGGGGTCAACAAGTACTATGCCAAGTCTGTG | | | | | |
| | AAGGGCAGATTTGCCATCAGCAGAGATGACAGCAAGTCTACCCTGTTCCTGCAGATGAACAGCC | | | | | |
| | TGACCACAGATGACACTGCTGTGTACTACTGTGCCAGATGTCCCATTCCTAGAGCTGCCAGCTA | | | | | |
| | CAGAAATGGGGACAACTACTTTGAGTTTGGCCAGGGCACCCTGGTCACAGTGTCCTCTGGCGGA | | | | | |
| | GGTGGCAGCGGAGGTGGCGGATCACAGGCTGTGGTCACCCAAGAGCCTAGCCTGTCTGTGTCTC | | | | | |
| | CTGGTGGCACAGTGACACTGACATGTGCCCTGTCCTCTGCCTCTGTGTCTACCAGCAGCTACCC | | | | | |
| | CAGCTGGTATCAGCAGACACCTGGCCAGCCTCCAAGAATGCTGATCCACAACACAGACACCAGA | | | | | |
| | TCCTCTGGGGTGCCAGACAGATTCTCTGGCAGCATCCTGGGCAAGAAGGCTGCCCTGACAATCA | | | | | |
| | CTGGTGCCCAGGCTGATGATGAGTCTGACTACTACTGTGTGGTGTACCTTGGCAATGGCTTCTG | | | | | |
| | GGTGTTTGGTGGTGGCACCAAGCTGACAGTGCTGGGCGGAGGAGGCGGAGGTGGAGGAGGAGAA | | | | | |
| | CCCAAGAGCTGTGACAAGACCCACACCTGTCCTCCATGTCCTGCTCCAGAACTGCTTGGAGGCC | | | | | |
| | CTTCTGTGTTCCTGTTTCCTCCAAAGCCTAAGGACACCCTGATGATCAGCAGAACCCCTGAAGT | | | | | |
| | GACCTGTGTGGTGGTTGATGTGTCCCATGAGGACCCAGAAGTGAAGTTCAATTGGTATGTGGAT | | | | | |
| | GGGGTTGAAGTGCACAATGCCAAGACCAAGCCTAGAGAGGAACAGTACAACTCCACCTACAGAG | | | | | |
| | TGGTGTCTGTGCTGACAGTGCTGCACCAGGACTGGCTGAATGGCAAAGAGTACAAGTGCAAGGT | | | | | |
| | GTCCAACAAGGCCCTGCCTGCTCCTATTGAGAAAACCATCTCCAAGGCCAAGGGCCAGCCAAGA | | | | | |
| | GAACCCCAGGTTTACACCCTGCCACCTAGCAGAGAAGAGATGACCAAGAACCAGGTGTCCCTGA | | | | | |
| | CCTGCCTGGTTAAGGGCTTCTACCCCTCTGACATTGCTGTGGAATGGGAGAGCAATGGCCAGCC | | | | | |
| | TGAAAACAACTACAAGACAACCCCTCCTGTGCTGGACTCAGATGGCTCATTCTTCCTGTACAGC | | | | | |
| | AAGCTGACTGTGGACAAGTCCAGGTGGCAGCAGGGAAATGTGTTCAGCTGCTCTGTGATGCATG | | | | | |
| | AGGCCCTGCACAACCACTACACCCAGAAAAGTCTGAGTCTGAGCCCTGGCAAG | | | | | |
| 31B6- | 324 | 31B6 VH | 4GS3 | 31B6 VL | 9G Modified IgG2a | IgG2a |
| VH3VL- | | | | | Hinge | |
| 9GIgG2a | GAGGTGCAGCTGCTGCAGAGTGGTGGTGGTGTTGTGCAGCCTGGTGGCTCTCTGAGACTGTCTT | | | | | |
| | GTGAAGCCTCTGGCTTCACCTTCAGCAGCTACAGCATGCACTGGGTCAGACAGGCCCCTGGCAA | | | | | |
| | AGGACTGGAATGGCTGACCCTGATCAGCTACAATGGGGTCAACAAGTACTATGCCAAGTCTGTG | | | | | |
| | AAGGGCAGATTTGCCATCAGCAGAGATGACAGCAAGTCTACCCTGTTCCTGCAGATGAACAGCC | | | | | |
| | TGACCACAGATGACACTGCTGTGTACTACTGTGCCAGATGTCCCATTCCTAGAGCTGCCAGCTA | | | | | |
| | CAGAAATGGGGACAACTACTTTGAGTTTGGCCAGGGCACCCTGGTCACAGTGTCCTCTGGTGGA | | | | | |
| | GGCGGTTCAGGCGGAGGTGGCAGCGGCGGTGGAGGGTCGCAGGCTGTGGTCACCCAAGAGCCTA | | | | | |
| | GCCTGTCTGTGTCTCCTGGTGGCACAGTGACACTGACATGTGCCCTGTCCTCTGCCTCTGTGTC | | | | | |
| | TACCAGCAGCTACCCCAGCTGGTATCAGCAGACACCTGGCCAGCCTCCAAGAATGCTGATCCAC | | | | | |
| | AACACAGACACCAGATCCTCTGGGGTGCCAGACAGATTCTCTGGCAGCATCCTGGGCAAGAAGG | | | | | |
| | CTGCCCTGACAATCACTGGTGCCCAGGCTGATGATGAGTCTGACTACTACTGTGTGGTGTACCT | | | | | |
| | TGGCAATGGCTTCTGGGTGTTTGGTGGTGGCACCAAGCTGACAGTGCTGGGCGGAGGAGGCGGA | | | | | |
| | GGTGGAGGAGGAGAGCCTAGAGGCCCCACCATCAAGCCCTGTCCTCCATGCAAGTGTCCTGCTC | | | | | |
| | CTAACCTGCTTGGAGGCCCCTCTGTGTTCATCTTCCCACCTAAGATCAAGGATGTGCTGATGAT | | | | | |
| | CTCTCTGAGCCCCATTGTGACCTGTGTGGTGGTGGATGTGTCTGAGGATGACCCTGATGTGCAG | | | | | |
| | ATCTCTTGGTTTGTGAACAATGTGGAAGTGCACACAGCCCAGACACAGACCCACAGAGAGGACT | | | | | |
| | ACAACAGCACCCTGAGAGTGGTGTCTGCCCTGCCTATCCAGCACCAGGACTGGATGAGTGGCAA | | | | | |
| | AGAGTTCAAGTGCAAAGTGAACAACAAGGACCTGCCTGCTCCAATTGAGAGAACCATCAGCAAG | | | | | |
| | CCCAAGGGCTCTGTTAGAGCCCCTCAAGTGTATGTGCTGCCTCCACCTGAGGAAGAGATGACCA | | | | | |
| | AGAAACAAGTGACCCTGACATGCATGGTCACAGACTTCATGCCTGAGGACATCTATGTGGAATG | | | | | |
| | GACCAACAATGGCAAGACAGAGCTGAACTACAAGAACACTGAGCCTGTGCTGGACTCTGATGGC | | | | | |
| | AGCTACTTCATGTACAGCAAGCTGAGGGTTGAGAAGAAGAACTGGGTTGAGAGAAACAGCTACA | | | | | |
| | GCTGCTCTGTGGTGCATGAGGGCCTGCACAATCACCACACCACCAAGAGCTTCAGCAGAACCCC | | | | | |
| | TGGCAAG | | | | | |
| 31B6- | 325 | 31B6 VH | 4GS4 | 31B6 VL | 9G Modified IgG2a | IgG2a |
| VH4VL- | | | | | Hinge | |
| 9GIgG2a | GAGGTGCAGCTGCTGCAGAGTGGTGGTGGTGTTGTGCAGCCTGGTGGCTCTCTGAGACTGTCTT | | | | | |
| | GTGAAGCCTCTGGCTTCACCTTCAGCAGCTACAGCATGCACTGGGTCAGACAGGCCCCTGGCAA | | | | | |
| | AGGACTGGAATGGCTGACCCTGATCAGCTACAATGGGGTCAACAAGTACTATGCCAAGTCTGTG | | | | | |
| | AAGGGCAGATTTGCCATCAGCAGAGATGACAGCAAGTCTACCCTGTTCCTGCAGATGAACAGCC | | | | | |
| | TGACCACAGATGACACTGCTGTGTACTACTGTGCCAGATGTCCCATTCCTAGAGCTGCCAGCTA | | | | | |
| | CAGAAATGGGGACAACTACTTTGAGTTTGGCCAGGGCACCCTGGTCACAGTGTCCTCTGGTGGA | | | | | |
| | GGCGGTTCAGGCGGAGGTGGCAGCGGCGGTGGAGGGTCAGGTGGAGGTGGATCACAGGCTGTGG | | | | | |
| | TCACCCAAGAGCCTAGCCTGTCTGTGTCTCCTGGTGGCACAGTGACACTGACATGTGCCCTGTC | | | | | |
| | CTCTGCCTCTGTGTCTACCAGCAGCTACCCCAGCTGGTATCAGCAGACACCTGGCCAGCCTCCA | | | | | |
| | AGAATGCTGATCCACAACACAGACACCAGATCCTCTGGGGTGCCAGACAGATTCTCTGGCAGCA | | | | | |
| | TCCTGGGCAAGAAGGCTGCCCTGACAATCACTGGTGCCCAGGCTGATGATGAGTCTGACTACTA | | | | | |
| | CTGTGTGGTGTACCTTGGCAATGGCTTCTGGGTGTTTGGTGGTGGCACCAAGCTGACAGTGCTG | | | | | |
| | GGCGGAGGAGGCGGAGGTGGAGGAGGAGAGCCTAGAGGCCCCACCATCAAGCCCTGTCCTCCAT | | | | | |
| | GCAAGTGTCCTGCTCCTAACCTGCTTGGAGGCCCCTCTGTGTTCATCTTCCCACCTAAGATCAA | | | | | |
| | GGATGTGCTGATGATCTCTCTGAGCCCCATTGTGACCTGTGTGGTGGTGGATGTGTCTGAGGAT | | | | | |
| | GACCCTGATGTGCAGATCTCTTGGTTTGTGAACAATGTGGAAGTGCACACAGCCCAGACACAGA | | | | | |
| | CCCACAGAGAGGACTACAACAGCACCCTGAGAGTGGTGTCTGCCCTGCCTATCCAGCACCAGGA | | | | | |
| | CTGGATGAGTGGCAAAGAGTTCAAGTGCAAAGTGAACAACAAGGACCTGCCTGCTCCAATTGAG | | | | | |
| | AGAACCATCAGCAAGCCCAAGGGCTCTGTTAGAGCCCCTCAAGTGTATGTGCTGCCTCCACCTG | | | | | |
| | AGGAAGAGATGACCAAGAAACAAGTGACCCTGACATGCATGGTCACAGACTTCATGCCTGAGGA | | | | | |
| | CATCTATGTGGAATGGACCAACAATGGCAAGACAGAGCTGAACTACAAGAACACTGAGCCTGTG | | | | | |
| | CTGGACTCTGATGGCAGCTACTTCATGTACAGCAAGCTGAGGGTTGAGAAGAAGAACTGGGTTG | | | | | |
| | AGAGAAACAGCTACAGCTGCTCTGTGGTGCATGAGGGCCTGCACAATCACCACACCACCAAGAG | | | | | |
| | CTTCAGCAGAACCCCTGGCAAG | | | | | |
| 31B6- | 348 | 31B6 VH | 4GS4 | 31B6 VL | 9G Modified IgG1 | IgG1 |
| VH4VL- | | | | | Hinge | |
| 9GIgG1 | GAGGTGCAGCTGCTGCAGAGTGGTGGTGGTGTTGTGCAGCCTGGTGGCTCTCTGAGACTGTCTT | | | | | |
| | GTGAAGCCTCTGGCTTCACCTTCAGCAGCTACAGCATGCACTGGGTCAGACAGGCCCCTGGCAA | | | | | |
| | AGGACTGGAATGGCTGACCCTGATCAGCTACAATGGGGTCAACAAGTACTATGCCAAGTCTGTG | | | | | |
| | AAGGGCAGATTTGCCATCAGCAGAGATGACAGCAAGTCTACCCTGTTCCTGCAGATGAACAGCC | | | | | |
| | TGACCACAGATGACACTGCTGTGTACTACTGTGCCAGATGTCCCATTCCTAGAGCTGCCAGCTA | | | | | |
| | CAGAAATGGGGACAACTACTTTGAGTTTGGCCAGGGCACCCTGGTCACAGTGTCCTCTGGTGGA | | | | | |
| | GGCGGTTCAGGCGGAGGTGGCAGCGGCGGTGGAGGGTCAGGTGGAGGTGGATCACAGGCTGTGG | | | | | |
| | TCACCCAAGAGCCTAGCCTGTCTGTGTCTCCTGGTGGCACAGTGACACTGACATGTGCCCTGTC | | | | | |
| | CTCTGCCTCTGTGTCTACCAGCAGCTACCCCAGCTGGTATCAGCAGACACCTGGCCAGCCTCCA | | | | | |
| | AGAATGCTGATCCACAACACAGACACCAGATCCTCTGGGGTGCCAGACAGATTCTCTGGCAGCA | | | | | |
| | TCCTGGGCAAGAAGGCTGCCCTGACAATCACTGGTGCCCAGGCTGATGATGAGTCTGACTACTA | | | | | |
| | CTGTGTGGTGTACCTTGGCAATGGCTTCTGGGTGTTTGGTGGTGGCACCAAGCTGACAGTGCTG | | | | | |
| | GGCGGAGGAGGCGGAGGTGGAGGAGGAGAACCCAAGAGCTGTGACAAGACCCACACCTGTCCTC | | | | | |
| | CATGTCCTGCTCCAGAACTGCTTGGAGGCCCTTCTGTGTTCCTGTTTCCTCCAAAGCCTAAGGA | | | | | |
| | CACCCTGATGATCAGCAGAACCCCTGAAGTGACCTGTGTGGTGGTTGATGTGTCCCATGAGGAC | | | | | |
| | CCAGAAGTGAAGTTCAATTGGTATGTGGATGGGGTTGAAGTGCACAATGCCAAGACCAAGCCTA | | | | | |
| | GAGAGGAACAGTACAACTCCACCTACAGAGTGGTGTCTGTGCTGACAGTGCTGCACCAGGACTG | | | | | |
| | GCTGAATGGCAAAGAGTACAAGTGCAAGGTGTCCAACAAGGCCCTGCCTGCTCCTATTGAGAAA | | | | | |
| | ACCATCTCCAAGGCCAAGGGCCAGCCAAGAGAACCCCAGGTTTACACCCTGCCACCTAGCAGAG | | | | | |
| | AAGAGATGACCAAGAACCAGGTGTCCCTGACCTGCCTGGTTAAGGGCTTCTACCCCTCTGACAT | | | | | |
| | TGCTGTGGAATGGGAGAGCAATGGCCAGCCTGAAAACAACTACAAGACAACCCCTCCTGTGCTG | | | | | |
| | GACTCAGATGGCTCATTCTTCCTGTACAGCAAGCTGACTGTGGACAAGTCCAGGTGGCAGCAGG | | | | | |
| | GAAATGTGTTCAGCTGCTCTGTGATGCATGAGGCCCTGCACAACCACTACACCCAGAAAAGTCT | | | | | |
| | GAGTCTGAGCCCTGGCAAG | | | | | |
| 31B6- | 326 | 31B6 VL | 4GS2 | 31B6 VH | 9G Modified IgG2a | IgG2a |
| VL2VH- | | | | | Hinge | |
| 9GIgG2a | CAGGCTGTGGTCACCCAAGAGCCTAGCCTGTCTGTGTCTCCTGGTGGCACAGTGACACTGACAT | | | | | |
| | GTGCCCTGTCCTCTGCCTCTGTGTCTACCAGCAGCTACCCCAGCTGGTATCAGCAGACACCTGG | | | | | |
| | CCAGCCTCCAAGAATGCTGATCCACAACACAGACACCAGATCCTCTGGGGTGCCAGACAGATTC | | | | | |
| | TCTGGCAGCATCCTGGGCAAGAAGGCTGCCCTGACAATCACTGGTGCCCAGGCTGATGATGAGT | | | | | |
| | CTGACTACTACTGTGTGGTGTACCTTGGCAATGGCTTCTGGGTGTTTGGTGGTGGCACCAAGCT | | | | | |
| | GACAGTGCTGGGCGGAGGTGGCAGCGGAGGTGGCGGATCAGAGGTGCAGCTGCTGCAGAGTGGT | | | | | |
| | GGTGGTGTTGTGCAGCCTGGTGGCTCTCTGAGACTGTCTTGTGAAGCCTCTGGCTTCACCTTCA | | | | | |
| | GCAGCTACAGCATGCACTGGGTCAGACAGGCCCCTGGCAAAGGACTGGAATGGCTGACCCTGAT | | | | | |
| | CAGCTACAATGGGGTCAACAAGTACTATGCCAAGTCTGTGAAGGGCAGATTTGCCATCAGCAGA | | | | | |
| | GATGACAGCAAGTCTACCCTGTTCCTGCAGATGAACAGCCTGACCACAGATGACACTGCTGTGT | | | | | |
| | ACTACTGTGCCAGATGTCCCATTCCTAGAGCTGCCAGCTACAGAAATGGGGACAACTACTTTGA | | | | | |
| | GTTTGGCCAGGGCACCCTGGTCACAGTGTCCTCTGGCGGAGGAGGCGGAGGTGGAGGAGGAGAG | | | | | |
| | CCTAGAGGCCCCACCATCAAGCCCTGTCCTCCATGCAAGTGTCCTGCTCCTAACCTGCTTGGAG | | | | | |
| | GCCCCTCTGTGTTCATCTTCCCACCTAAGATCAAGGATGTGCTGATGATCTCTCTGAGCCCCAT | | | | | |
| | TGTGACCTGTGTGGTGGTGGATGTGTCTGAGGATGACCCTGATGTGCAGATCTCTTGGTTTGTG | | | | | |
| | AACAATGTGGAAGTGCACACAGCCCAGACACAGACCCACAGAGAGGACTACAACAGCACCCTGA | | | | | |
| | GAGTGGTGTCTGCCCTGCCTATCCAGCACCAGGACTGGATGAGTGGCAAAGAGTTCAAGTGCAA | | | | | |
| | AGTGAACAACAAGGACCTGCCTGCTCCAATTGAGAGAACCATCAGCAAGCCCAAGGGCTCTGTT | | | | | |
| | AGAGCCCCTCAAGTGTATGTGCTGCCTCCACCTGAGGAAGAGATGACCAAGAAACAAGTGACCC | | | | | |
| | TGACATGCATGGTCACAGACTTCATGCCTGAGGACATCTATGTGGAATGGACCAACAATGGCAA | | | | | |
| | GACAGAGCTGAACTACAAGAACACTGAGCCTGTGCTGGACTCTGATGGCAGCTACTTCATGTAC | | | | | |
| | AGCAAGCTGAGGGTTGAGAAGAAGAACTGGGTTGAGAGAAACAGCTACAGCTGCTCTGTGGTGC | | | | | |
| | ATGAGGGCCTGCACAATCACCACACCACCAAGAGCTTCAGCAGAACCCCTGGCAAG | | | | | |
| 31B6- | 327 | 31B6 VL | 4GS3 | 31B6 VH | 9G Modified IgG2a | IgG2a |
| VL3 VH- | | | | | Hinge | |
| 9GIgG2a | CAGGCTGTGGTCACCCAAGAGCCTAGCCTGTCTGTGTCTCCTGGTGGCACAGTGACACTGACAT | | | | | |
| | GTGCCCTGTCCTCTGCCTCTGTGTCTACCAGCAGCTACCCCAGCTGGTATCAGCAGACACCTGG | | | | | |
| | CCAGCCTCCAAGAATGCTGATCCACAACACAGACACCAGATCCTCTGGGGTGCCAGACAGATTC | | | | | |
| | TCTGGCAGCATCCTGGGCAAGAAGGCTGCCCTGACAATCACTGGTGCCCAGGCTGATGATGAGT | | | | | |
| | CTGACTACTACTGTGTGGTGTACCTTGGCAATGGCTTCTGGGTGTTTGGTGGTGGCACCAAGCT | | | | | |
| | GACAGTGCTGGGTGGAGGCGGTTCAGGCGGAGGTGGCAGCGGCGGTGGAGGGTCGGAGGTGCAG | | | | | |
| | CTGCTGCAGAGTGGTGGTGGTGTTGTGCAGCCTGGTGGCTCTCTGAGACTGTCTTGTGAAGCCT | | | | | |
| | CTGGCTTCACCTTCAGCAGCTACAGCATGCACTGGGTCAGACAGGCCCCTGGCAAAGGACTGGA | | | | | |
| | ATGGCTGACCCTGATCAGCTACAATGGGGTCAACAAGTACTATGCCAAGTCTGTGAAGGGCAGA | | | | | |
| | TTTGCCATCAGCAGAGATGACAGCAAGTCTACCCTGTTCCTGCAGATGAACAGCCTGACCACAG | | | | | |
| | ATGACACTGCTGTGTACTACTGTGCCAGATGTCCCATTCCTAGAGCTGCCAGCTACAGAAATGG | | | | | |
| | GGACAACTACTTTGAGTTTGGCCAGGGCACCCTGGTCACAGTGTCCTCTGGCGGAGGAGGCGGA | | | | | |
| | GGTGGAGGAGGAGAGCCTAGAGGCCCCACCATCAAGCCCTGTCCTCCATGCAAGTGTCCTGCTC | | | | | |
| | CTAACCTGCTTGGAGGCCCCTCTGTGTTCATCTTCCCACCTAAGATCAAGGATGTGCTGATGAT | | | | | |
| | CTCTCTGAGCCCCATTGTGACCTGTGTGGTGGTGGATGTGTCTGAGGATGACCCTGATGTGCAG | | | | | |
| | ATCTCTTGGTTTGTGAACAATGTGGAAGTGCACACAGCCCAGACACAGACCCACAGAGAGGACT | | | | | |
| | ACAACAGCACCCTGAGAGTGGTGTCTGCCCTGCCTATCCAGCACCAGGACTGGATGAGTGGCAA | | | | | |
| | AGAGTTCAAGTGCAAAGTGAACAACAAGGACCTGCCTGCTCCAATTGAGAGAACCATCAGCAAG | | | | | |
| | CCCAAGGGCTCTGTTAGAGCCCCTCAAGTGTATGTGCTGCCTCCACCTGAGGAAGAGATGACCA | | | | | |
| | AGAAACAAGTGACCCTGACATGCATGGTCACAGACTTCATGCCTGAGGACATCTATGTGGAATG | | | | | |
| | GACCAACAATGGCAAGACAGAGCTGAACTACAAGAACACTGAGCCTGTGCTGGACTCTGATGGC | | | | | |
| | AGCTACTTCATGTACAGCAAGCTGAGGGTTGAGAAGAAGAACTGGGTTGAGAGAAACAGCTACA | | | | | |
| | GCTGCTCTGTGGTGCATGAGGGCCTGCACAATCACCACACCACCAAGAGCTTCAGCAGAACCCC | | | | | |
| | TGGCAAG | | | | | |
| 31B6- | 328 | 31B6 VL | 4GS4 | 31B6 VH | 9G Modified IgG2a | IgG2a |
| VL4VH- | | | | | Hinge | |
| 9GIgG2a | CAGGCTGTGGTCACCCAAGAGCCTAGCCTGTCTGTGTCTCCTGGTGGCACAGTGACACTGACAT | | | | | |
| | GTGCCCTGTCCTCTGCCTCTGTGTCTACCAGCAGCTACCCCAGCTGGTATCAGCAGACACCTGG | | | | | |
| | CCAGCCTCCAAGAATGCTGATCCACAACACAGACACCAGATCCTCTGGGGTGCCAGACAGATTC | | | | | |
| | TCTGGCAGCATCCTGGGCAAGAAGGCTGCCCTGACAATCACTGGTGCCCAGGCTGATGATGAGT | | | | | |
| | CTGACTACTACTGTGTGGTGTACCTTGGCAATGGCTTCTGGGTGTTTGGTGGTGGCACCAAGCT | | | | | |
| | GACAGTGCTGGGTGGAGGCGGTTCAGGCGGAGGTGGCAGCGGCGGTGGAGGGTCAGGTGGAGGT | | | | | |
| | GGATCAGAGGTGCAGCTGCTGCAGAGTGGTGGTGGTGTTGTGCAGCCTGGTGGCTCTCTGAGAC | | | | | |
| | TGTCTTGTGAAGCCTCTGGCTTCACCTTCAGCAGCTACAGCATGCACTGGGTCAGACAGGCCCC | | | | | |
| | TGGCAAAGGACTGGAATGGCTGACCCTGATCAGCTACAATGGGGTCAACAAGTACTATGCCAAG | | | | | |
| | TCTGTGAAGGGCAGATTTGCCATCAGCAGAGATGACAGCAAGTCTACCCTGTTCCTGCAGATGA | | | | | |
| | ACAGCCTGACCACAGATGACACTGCTGTGTACTACTGTGCCAGATGTCCCATTCCTAGAGCTGC | | | | | |
| | CAGCTACAGAAATGGGGACAACTACTTTGAGTTTGGCCAGGGCACCCTGGTCACAGTGTCCTCT | | | | | |
| | GGCGGAGGAGGCGGAGGTGGAGGAGGAGAGCCTAGAGGCCCCACCATCAAGCCCTGTCCTCCAT | | | | | |
| | GCAAGTGTCCTGCTCCTAACCTGCTTGGAGGCCCCTCTGTGTTCATCTTCCCACCTAAGATCAA | | | | | |
| | GGATGTGCTGATGATCTCTCTGAGCCCCATTGTGACCTGTGTGGTGGTGGATGTGTCTGAGGAT | | | | | |
| | GACCCTGATGTGCAGATCTCTTGGTTTGTGAACAATGTGGAAGTGCACACAGCCCAGACACAGA | | | | | |
| | CCCACAGAGAGGACTACAACAGCACCCTGAGAGTGGTGTCTGCCCTGCCTATCCAGCACCAGGA | | | | | |
| | CTGGATGAGTGGCAAAGAGTTCAAGTGCAAAGTGAACAACAAGGACCTGCCTGCTCCAATTGAG | | | | | |
| | AGAACCATCAGCAAGCCCAAGGGCTCTGTTAGAGCCCCTCAAGTGTATGTGCTGCCTCCACCTG | | | | | |
| | AGGAAGAGATGACCAAGAAACAAGTGACCCTGACATGCATGGTCACAGACTTCATGCCTGAGGA | | | | | |
| | CATCTATGTGGAATGGACCAACAATGGCAAGACAGAGCTGAACTACAAGAACACTGAGCCTGTG | | | | | |
| | CTGGACTCTGATGGCAGCTACTTCATGTACAGCAAGCTGAGGGTTGAGAAGAAGAACTGGGTTG | | | | | |
| | AGAGAAACAGCTACAGCTGCTCTGTGGTGCATGAGGGCCTGCACAATCACCACACCACCAAGAG | | | | | |
| | CTTCAGCAGAACCCCTGGCAAG | | | | | |
| 8H1- | 329 | 8H1 VH | 4GS2 | 8H1 VL | 9G Modified IgG2a | IgG2a |
| VH2VL- | | | | | Hinge | |
| 9GIgG2a | GAGGTGCAGCTGGTGGAAAGTGGTGGTGGACTGGTTCAGCCTGGTGGCAGCCTGAGACTGTCTT | | | | | |
| | GTGCTGCCTCTGGCTTCACCTTCAGCATCTACACCATGAGCTGGGTCAGACAGGCTCCTGGCAA | | | | | |
| | AGGCCTGGAATGGGTGTCAGCTATCCTGTCTGATGGCAGCACCTACTATGCTGACTCTGTGGAA | | | | | |
| | GGCAGATTCACCATCAGCAGAGACAACAGCAAGACCACACTGTACCTGCAGATGAACAGCCTGA | | | | | |
| | CAGCTGAGGACACTGCTGTGTACTACTGCACCAAGAGAGTGGAAGGCTCCTTCAGAGGCTGGGG | | | | | |
| | ACAGGGAACACTGGTCACTGTGTCCTCTGGCGGAGGTGGCAGCGGAGGTGGCGGATCAGAGATT | | | | | |
| | GTGATGACACAGAGCCCTGGCACACTGTCTCTGAGCCCTGGGGAATCTGCCACACTGAGCTGTA | | | | | |
| | GAGCCAGCCAGTCTGTGTCTACCACCTACCTGGCCTGGTATCAGCAGAAGCCTGGACAGGCTCC | | | | | |
| | CAGACTGCTGATCTATGGGGCCTCTTCTAGAGCCACAGGCATCCCTGACAGATTTTCTGGCAGT | | | | | |
| | GGCTCTGGCACAGACTTCACCCTGACCATCAGCAGACTGGAACCTGAGGACTTTGCTGTGTACT | | | | | |
| | ACTGCCAGCAGTATGGTGGCAGCAGGCTGATCACATTTGGCCAGGGCACAAGACTGGAAATCAA | | | | | |
| | GGGCGGAGGAGGCGGAGGTGGAGGAGGAGAGCCTAGAGGCCCCACCATCAAGCCCTGTCCTCCA | | | | | |
| | TGCAAGTGTCCTGCTCCTAACCTGCTTGGAGGCCCCTCTGTGTTCATCTTCCCACCTAAGATCA | | | | | |
| | AGGATGTGCTGATGATCTCTCTGAGCCCCATTGTGACCTGTGTGGTGGTGGATGTGTCTGAGGA | | | | | |
| | TGACCCTGATGTGCAGATCTCTTGGTTTGTGAACAATGTGGAAGTGCACACAGCCCAGACACAG | | | | | |
| | ACCCACAGAGAGGACTACAACAGCACCCTGAGAGTGGTGTCTGCCCTGCCTATCCAGCACCAGG | | | | | |
| | ACTGGATGAGTGGCAAAGAGTTCAAGTGCAAAGTGAACAACAAGGACCTGCCTGCTCCAATTGA | | | | | |
| | GAGAACCATCAGCAAGCCCAAGGGCTCTGTTAGAGCCCCTCAAGTGTATGTGCTGCCTCCACCT | | | | | |
| | GAGGAAGAGATGACCAAGAAACAAGTGACCCTGACATGCATGGTCACAGACTTCATGCCTGAGG | | | | | |
| | ACATCTATGTGGAATGGACCAACAATGGCAAGACAGAGCTGAACTACAAGAACACTGAGCCTGT | | | | | |
| | GCTGGACTCTGATGGCAGCTACTTCATGTACAGCAAGCTGAGGGTTGAGAAGAAGAACTGGGTT | | | | | |
| | GAGAGAAACAGCTACAGCTGCTCTGTGGTGCATGAGGGCCTGCACAATCACCACACCACCAAGA | | | | | |
| | GCTTCAGCAGAACCCCTGGCAAG | | | | | |
| 8H1- | 349 | 8H1 VH | 4GS2 | 8H1 VL | 9G Modified IgG1 | IgG1 |
| VH2VL- | | | | | Hinge | |
| 9GIgG1 | GAGGTGCAGCTGGTGGAAAGTGGTGGTGGACTGGTTCAGCCTGGTGGCAGCCTGAGACTGTCTT | | | | | |
| | GTGCTGCCTCTGGCTTCACCTTCAGCATCTACACCATGAGCTGGGTCAGACAGGCTCCTGGCAA | | | | | |
| | AGGCCTGGAATGGGTGTCAGCTATCCTGTCTGATGGCAGCACCTACTATGCTGACTCTGTGGAA | | | | | |
| | GGCAGATTCACCATCAGCAGAGACAACAGCAAGACCACACTGTACCTGCAGATGAACAGCCTGA | | | | | |
| | CAGCTGAGGACACTGCTGTGTACTACTGCACCAAGAGAGTGGAAGGCTCCTTCAGAGGCTGGGG | | | | | |
| | ACAGGGAACACTGGTCACTGTGTCCTCTGGCGGAGGTGGCAGCGGAGGTGGCGGATCAGAGATT | | | | | |
| | GTGATGACACAGAGCCCTGGCACACTGTCTCTGAGCCCTGGGGAATCTGCCACACTGAGCTGTA | | | | | |
| | GAGCCAGCCAGTCTGTGTCTACCACCTACCTGGCCTGGTATCAGCAGAAGCCTGGACAGGCTCC | | | | | |
| | CAGACTGCTGATCTATGGGGCCTCTTCTAGAGCCACAGGCATCCCTGACAGATTTTCTGGCAGT | | | | | |
| | GGCTCTGGCACAGACTTCACCCTGACCATCAGCAGACTGGAACCTGAGGACTTTGCTGTGTACT | | | | | |
| | ACTGCCAGCAGTATGGTGGCAGCAGGCTGATCACATTTGGCCAGGGCACAAGACTGGAAATCAA | | | | | |
| | GGGCGGAGGAGGCGGAGGTGGAGGAGGAGAACCCAAGAGCTGTGACAAGACCCACACCTGTCCT | | | | | |
| | CCATGTCCTGCTCCAGAACTGCTTGGAGGCCCTTCTGTGTTCCTGTTTCCTCCAAAGCCTAAGG | | | | | |
| | ACACCCTGATGATCAGCAGAACCCCTGAAGTGACCTGTGTGGTGGTTGATGTGTCCCATGAGGA | | | | | |
| | CCCAGAAGTGAAGTTCAATTGGTATGTGGATGGGGTTGAAGTGCACAATGCCAAGACCAAGCCT | | | | | |
| | AGAGAGGAACAGTACAACTCCACCTACAGAGTGGTGTCTGTGCTGACAGTGCTGCACCAGGACT | | | | | |
| | GGCTGAATGGCAAAGAGTACAAGTGCAAGGTGTCCAACAAGGCCCTGCCTGCTCCTATTGAGAA | | | | | |
| | AACCATCTCCAAGGCCAAGGGCCAGCCAAGAGAACCCCAGGTTTACACCCTGCCACCTAGCAGA | | | | | |
| | GAAGAGATGACCAAGAACCAGGTGTCCCTGACCTGCCTGGTTAAGGGCTTCTACCCCTCTGACA | | | | | |
| | TTGCTGTGGAATGGGAGAGCAATGGCCAGCCTGAAAACAACTACAAGACAACCCCTCCTGTGCT | | | | | |
| | GGACTCAGATGGCTCATTCTTCCTGTACAGCAAGCTGACTGTGGACAAGTCCAGGTGGCAGCAG | | | | | |
| | GGAAATGTGTTCAGCTGCTCTGTGATGCATGAGGCCCTGCACAACCACTACACCCAGAAAAGTC | | | | | |
| | TGAGTCTGAGCCCTGGCAAG | | | | | |
| 8H1- | 330 | 8H1 VH | 4GS3 | 8H1 VL | 9G Modified IgG2a | IgG2a |
| VH3VL- | | | | | Hinge | |
| 9GIgG2a | GAGGTGCAGCTGGTGGAAAGTGGTGGTGGACTGGTTCAGCCTGGTGGCAGCCTGAGACTGTCTT | | | | | |
| | GTGCTGCCTCTGGCTTCACCTTCAGCATCTACACCATGAGCTGGGTCAGACAGGCTCCTGGCAA | | | | | |
| | AGGCCTGGAATGGGTGTCAGCTATCCTGTCTGATGGCAGCACCTACTATGCTGACTCTGTGGAA | | | | | |
| | GGCAGATTCACCATCAGCAGAGACAACAGCAAGACCACACTGTACCTGCAGATGAACAGCCTGA | | | | | |
| | CAGCTGAGGACACTGCTGTGTACTACTGCACCAAGAGAGTGGAAGGCTCCTTCAGAGGCTGGGG | | | | | |
| | ACAGGGAACACTGGTCACTGTGTCCTCTGGTGGAGGCGGTTCAGGCGGAGGTGGCAGCGGCGGT | | | | | |
| | GGAGGGTCGGAGATTGTGATGACACAGAGCCCTGGCACACTGTCTCTGAGCCCTGGGGAATCTG | | | | | |
| | CCACACTGAGCTGTAGAGCCAGCCAGTCTGTGTCTACCACCTACCTGGCCTGGTATCAGCAGAA | | | | | |
| | GCCTGGACAGGCTCCCAGACTGCTGATCTATGGGGCCTCTTCTAGAGCCACAGGCATCCCTGAC | | | | | |
| | AGATTTTCTGGCAGTGGCTCTGGCACAGACTTCACCCTGACCATCAGCAGACTGGAACCTGAGG | | | | | |
| | ACTTTGCTGTGTACTACTGCCAGCAGTATGGTGGCAGCAGGCTGATCACATTTGGCCAGGGCAC | | | | | |
| | AAGACTGGAAATCAAGGGCGGAGGAGGCGGAGGTGGAGGAGGAGAGCCCAGGGGCCCCACCATC | | | | | |
| | AAGCCCTGCCCCCCCTGTAAGTGTCCAGCTCCCAACCTGCTGGGCGGACCCAGCGTGTTCATCT | | | | | |
| | TCCCCCCCAAGATCAAGGACGTGCTGATGATCAGCCTGAGCCCCATCGTGACCTGCGTGGTGGT | | | | | |
| | GGACGTGAGCGAGGACGACCCCGACGTGCAGATCAGCTGGTTCGTGAACAACGTGGAGGTGCAC | | | | | |
| | ACCGCCCAGACCCAGACCCACAGAGAGGACTACAACTCTACTCTGAGGGTCGTGTCCGCCCTGC | | | | | |
| | CCATCCAGCACCAGGACTGGATGAGCGGCAAAGAGTTCAAGTGCAAGGTCAACAACAAGGACCT | | | | | |
| | GCCAGCCCCCATCGAGAGGACCATCAGCAAGCCCAAGGGCAGCGTGAGAGCCCCACAGGTCTAC | | | | | |
| | GTGCTGCCCCCACCCGAGGAAGAGATGACCAAGAAGCAGGTCACACTGACCTGCATGGTGACCG | | | | | |
| | ACTTCATGCCCGAGGACATCTACGTGGAGTGGACCAACAACGGCAAGACCGAGCTGAACTACAA | | | | | |
| | GAACACCGAGCCAGTGCTGGACAGCGACGGCAGCTACTTCATGTACAGCAAGCTGAGGGTGGAG | | | | | |
| | AAGAAGAACTGGGTCGAGAGGAACAGCTACAGCTGCAGCGTGGTGCACGAGGGCCTGCACAACC | | | | | |
| | ACCACACCACCAAGAGCTTCAGCAGGACCCCCGGCAAG | | | | | |
| 8H1- | 331 | 8H1 VH | 4GS4 | 8H1 VL | 9G Modified IgG2a | IgG2a |
| VH4VL- | | | | | Hinge | |
| 9GIgG2a | GAGGTGCAGCTGGTGGAAAGTGGTGGTGGACTGGTTCAGCCTGGTGGCAGCCTGAGACTGTCTT | | | | | |
| | GTGCTGCCTCTGGCTTCACCTTCAGCATCTACACCATGAGCTGGGTCAGACAGGCTCCTGGCAA | | | | | |
| | AGGCCTGGAATGGGTGTCAGCTATCCTGTCTGATGGCAGCACCTACTATGCTGACTCTGTGGAA | | | | | |
| | GGCAGATTCACCATCAGCAGAGACAACAGCAAGACCACACTGTACCTGCAGATGAACAGCCTGA | | | | | |
| | CAGCTGAGGACACTGCTGTGTACTACTGCACCAAGAGAGTGGAAGGCTCCTTCAGAGGCTGGGG | | | | | |
| | ACAGGGAACACTGGTCACTGTGTCCTCTGGTGGAGGCGGTTCAGGCGGAGGTGGCAGCGGCGGT | | | | | |
| | GGAGGGTCAGGTGGAGGTGGATCAGAGATTGTGATGACACAGAGCCCTGGCACACTGTCTCTGA | | | | | |
| | GCCCTGGGGAATCTGCCACACTGAGCTGTAGAGCCAGCCAGTCTGTGTCTACCACCTACCTGGC | | | | | |
| | CTGGTATCAGCAGAAGCCTGGACAGGCTCCCAGACTGCTGATCTATGGGGCCTCTTCTAGAGCC | | | | | |
| | ACAGGCATCCCTGACAGATTTTCTGGCAGTGGCTCTGGCACAGACTTCACCCTGACCATCAGCA | | | | | |
| | GACTGGAACCTGAGGACTTTGCTGTGTACTACTGCCAGCAGTATGGTGGCAGCAGGCTGATCAC | | | | | |
| | ATTTGGCCAGGGCACAAGACTGGAAATCAAGGGCGGAGGAGGCGGAGGTGGAGGAGGAGAGCCT | | | | | |
| | AGAGGCCCCACCATCAAGCCCTGTCCTCCATGCAAGTGTCCTGCTCCTAACCTGCTTGGAGGCC | | | | | |
| | CCTCTGTGTTCATCTTCCCACCTAAGATCAAGGATGTGCTGATGATCTCTCTGAGCCCCATTGT | | | | | |
| | GACCTGTGTGGTGGTGGATGTGTCTGAGGATGACCCTGATGTGCAGATCTCTTGGTTTGTGAAC | | | | | |
| | AATGTGGAAGTGCACACAGCCCAGACACAGACCCACAGAGAGGACTACAACAGCACCCTGAGAG | | | | | |
| | TGGTGTCTGCCCTGCCTATCCAGCACCAGGACTGGATGAGTGGCAAAGAGTTCAAGTGCAAAGT | | | | | |
| | GAACAACAAGGACCTGCCTGCTCCAATTGAGAGAACCATCAGCAAGCCCAAGGGCTCTGTTAGA | | | | | |
| | GCCCCTCAAGTGTATGTGCTGCCTCCACCTGAGGAAGAGATGACCAAGAAACAAGTGACCCTGA | | | | | |
| | CATGCATGGTCACAGACTTCATGCCTGAGGACATCTATGTGGAATGGACCAACAATGGCAAGAC | | | | | |
| | AGAGCTGAACTACAAGAACACTGAGCCTGTGCTGGACTCTGATGGCAGCTACTTCATGTACAGC | | | | | |
| | AAGCTGAGGGTTGAGAAGAAGAACTGGGTTGAGAGAAACAGCTACAGCTGCTCTGTGGTGCATG | | | | | |
| | AGGGCCTGCACAATCACCACACCACCAAGAGCTTCAGCAGAACCCCTGGCAAG | | | | | |
| 8H1- | 350 | 8H1 VH | 4GS4 | 8H1 VL | 9G Modified IgG1 | IgG1 |
| VH4VL- | | | | | Hinge | |
| 9GIgG1 | GAGGTGCAGCTGGTGGAAAGTGGTGGTGGACTGGTTCAGCCTGGTGGCAGCCTGAGACTGTCTT | | | | | |
| | GTGCTGCCTCTGGCTTCACCTTCAGCATCTACACCATGAGCTGGGTCAGACAGGCTCCTGGCAA | | | | | |
| | AGGCCTGGAATGGGTGTCAGCTATCCTGTCTGATGGCAGCACCTACTATGCTGACTCTGTGGAA | | | | | |
| | GGCAGATTCACCATCAGCAGAGACAACAGCAAGACCACACTGTACCTGCAGATGAACAGCCTGA | | | | | |
| | CAGCTGAGGACACTGCTGTGTACTACTGCACCAAGAGAGTGGAAGGCTCCTTCAGAGGCTGGGG | | | | | |
| | ACAGGGAACACTGGTCACTGTGTCCTCTGGTGGAGGCGGTTCAGGCGGAGGTGGCAGCGGCGGT | | | | | |
| | GGAGGGTCAGGTGGAGGTGGATCAGAGATTGTGATGACACAGAGCCCTGGCACACTGTCTCTGA | | | | | |
| | GCCCTGGGGAATCTGCCACACTGAGCTGTAGAGCCAGCCAGTCTGTGTCTACCACCTACCTGGC | | | | | |
| | CTGGTATCAGCAGAAGCCTGGACAGGCTCCCAGACTGCTGATCTATGGGGCCTCTTCTAGAGCC | | | | | |
| | ACAGGCATCCCTGACAGATTTTCTGGCAGTGGCTCTGGCACAGACTTCACCCTGACCATCAGCA | | | | | |
| | GACTGGAACCTGAGGACTTTGCTGTGTACTACTGCCAGCAGTATGGTGGCAGCAGGCTGATCAC | | | | | |
| | ATTTGGCCAGGGCACAAGACTGGAAATCAAGGGCGGAGGAGGCGGAGGTGGAGGAGGAGAACCC | | | | | |
| | AAGAGCTGTGACAAGACCCACACCTGTCCTCCATGTCCTGCTCCAGAACTGCTTGGAGGCCCTT | | | | | |
| | CTGTGTTCCTGTTTCCTCCAAAGCCTAAGGACACCCTGATGATCAGCAGAACCCCTGAAGTGAC | | | | | |
| | CTGTGTGGTGGTTGATGTGTCCCATGAGGACCCAGAAGTGAAGTTCAATTGGTATGTGGATGGG | | | | | |
| | GTTGAAGTGCACAATGCCAAGACCAAGCCTAGAGAGGAACAGTACAACTCCACCTACAGAGTGG | | | | | |
| | TGTCTGTGCTGACAGTGCTGCACCAGGACTGGCTGAATGGCAAAGAGTACAAGTGCAAGGTGTC | | | | | |
| | CAACAAGGCCCTGCCTGCTCCTATTGAGAAAACCATCTCCAAGGCCAAGGGCCAGCCAAGAGAA | | | | | |
| | CCCCAGGTTTACACCCTGCCACCTAGCAGAGAAGAGATGACCAAGAACCAGGTGTCCCTGACCT | | | | | |
| | GCCTGGTTAAGGGCTTCTACCCCTCTGACATTGCTGTGGAATGGGAGAGCAATGGCCAGCCTGA | | | | | |
| | AAACAACTACAAGACAACCCCTCCTGTGCTGGACTCAGATGGCTCATTCTTCCTGTACAGCAAG | | | | | |
| | CTGACTGTGGACAAGTCCAGGTGGCAGCAGGGAAATGTGTTCAGCTGCTCTGTGATGCATGAGG | | | | | |
| | CCCTGCACAACCACTACACCCAGAAAAGTCTGAGTCTGAGCCCTGGCAAG | | | | | |
| 8H1- | 332 | 8H1 VL | 4GS2 | 8H1 VH | 9G Modified IgG2a | IgG2a |
| VL2VH- | | | | | Hinge | |
| 9GIgG2a | GAGATTGTGATGACACAGAGCCCTGGCACACTGTCTCTGAGCCCTGGGGAATCTGCCACACTGA | | | | | |
| | GCTGTAGAGCCAGCCAGTCTGTGTCTACCACCTACCTGGCCTGGTATCAGCAGAAGCCTGGACA | | | | | |
| | GGCTCCCAGACTGCTGATCTATGGGGCCTCTTCTAGAGCCACAGGCATCCCTGACAGATTTTCT | | | | | |
| | GGCAGTGGCTCTGGCACAGACTTCACCCTGACCATCAGCAGACTGGAACCTGAGGACTTTGCTG | | | | | |
| | TGTACTACTGCCAGCAGTATGGTGGCAGCAGGCTGATCACATTTGGCCAGGGCACAAGACTGGA | | | | | |
| | AATCAAGGGCGGAGGTGGCAGCGGAGGTGGCGGATCAGAGGTGCAGCTGGTGGAAAGTGGTGGT | | | | | |
| | GGACTGGTTCAGCCTGGTGGCAGCCTGAGACTGTCTTGTGCTGCCTCTGGCTTCACCTTCAGCA | | | | | |
| | TCTACACCATGAGCTGGGTCAGACAGGCTCCTGGCAAAGGCCTGGAATGGGTGTCAGCTATCCT | | | | | |
| | GTCTGATGGCAGCACCTACTATGCTGACTCTGTGGAAGGCAGATTCACCATCAGCAGAGACAAC | | | | | |
| | AGCAAGACCACACTGTACCTGCAGATGAACAGCCTGACAGCTGAGGACACTGCTGTGTACTACT | | | | | |
| | GCACCAAGAGAGTGGAAGGCTCCTTCAGAGGCTGGGGACAGGGAACACTGGTCACTGTGTCCTC | | | | | |
| | TGGCGGAGGAGGCGGAGGTGGAGGAGGAGAGCCTAGAGGCCCCACCATCAAGCCCTGTCCTCCA | | | | | |
| | TGCAAGTGTCCTGCTCCTAACCTGCTTGGAGGCCCCTCTGTGTTCATCTTCCCACCTAAGATCA | | | | | |
| | AGGATGTGCTGATGATCTCTCTGAGCCCCATTGTGACCTGTGTGGTGGTGGATGTGTCTGAGGA | | | | | |
| | TGACCCTGATGTGCAGATCTCTTGGTTTGTGAACAATGTGGAAGTGCACACAGCCCAGACACAG | | | | | |
| | ACCCACAGAGAGGACTACAACAGCACCCTGAGAGTGGTGTCTGCCCTGCCTATCCAGCACCAGG | | | | | |
| | ACTGGATGAGTGGCAAAGAGTTCAAGTGCAAAGTGAACAACAAGGACCTGCCTGCTCCAATTGA | | | | | |
| | GAGAACCATCAGCAAGCCCAAGGGCTCTGTTAGAGCCCCTCAAGTGTATGTGCTGCCTCCACCT | | | | | |
| | GAGGAAGAGATGACCAAGAAACAAGTGACCCTGACATGCATGGTCACAGACTTCATGCCTGAGG | | | | | |
| | ACATCTATGTGGAATGGACCAACAATGGCAAGACAGAGCTGAACTACAAGAACACTGAGCCTGT | | | | | |
| | GCTGGACTCTGATGGCAGCTACTTCATGTACAGCAAGCTGAGGGTTGAGAAGAAGAACTGGGTT | | | | | |
| | GAGAGAAACAGCTACAGCTGCTCTGTGGTGCATGAGGGCCTGCACAATCACCACACCACCAAGA | | | | | |
| | GCTTCAGCAGAACCCCTGGCAAG | | | | | |
| 8H1- | 333 | 8H1 VL | 4GS3 | 8H1 VH | 9G Modified IgG2a | IgG2a |
| VL3VH- | | | | | Hinge | |
| 9GIgG2a | GAGATTGTGATGACACAGAGCCCTGGCACACTGTCTCTGAGCCCTGGGGAATCTGCCACACTGA | | | | | |
| | GCTGTAGAGCCAGCCAGTCTGTGTCTACCACCTACCTGGCCTGGTATCAGCAGAAGCCTGGACA | | | | | |
| | GGCTCCCAGACTGCTGATCTATGGGGCCTCTTCTAGAGCCACAGGCATCCCTGACAGATTTTCT | | | | | |
| | GGCAGTGGCTCTGGCACAGACTTCACCCTGACCATCAGCAGACTGGAACCTGAGGACTTTGCTG | | | | | |
| | TGTACTACTGCCAGCAGTATGGTGGCAGCAGGCTGATCACATTTGGCCAGGGCACAAGACTGGA | | | | | |
| | AATCAAGGGTGGAGGCGGTTCAGGCGGAGGTGGCAGCGGCGGTGGAGGGTCGGAGGTGCAGCTG | | | | | |
| | GTGGAAAGTGGTGGTGGACTGGTTCAGCCTGGTGGCAGCCTGAGACTGTCTTGTGCTGCCTCTG | | | | | |
| | GCTTCACCTTCAGCATCTACACCATGAGCTGGGTCAGACAGGCTCCTGGCAAAGGCCTGGAATG | | | | | |
| | GGTGTCAGCTATCCTGTCTGATGGCAGCACCTACTATGCTGACTCTGTGGAAGGCAGATTCACC | | | | | |
| | ATCAGCAGAGACAACAGCAAGACCACACTGTACCTGCAGATGAACAGCCTGACAGCTGAGGACA | | | | | |
| | CTGCTGTGTACTACTGCACCAAGAGAGTGGAAGGCTCCTTCAGAGGCTGGGGACAGGGAACACT | | | | | |
| | GGTCACTGTGTCCTCTGGCGGAGGAGGCGGAGGTGGAGGAGGAGAGCCTAGAGGCCCCACCATC | | | | | |
| | AAGCCCTGTCCTCCATGCAAGTGTCCTGCTCCTAACCTGCTTGGAGGCCCCTCTGTGTTCATCT | | | | | |
| | TCCCACCTAAGATCAAGGATGTGCTGATGATCTCTCTGAGCCCCATTGTGACCTGTGTGGTGGT | | | | | |
| | GGATGTGTCTGAGGATGACCCTGATGTGCAGATCTCTTGGTTTGTGAACAATGTGGAAGTGCAC | | | | | |
| | ACAGCCCAGACACAGACCCACAGAGAGGACTACAACAGCACCCTGAGAGTGGTGTCTGCCCTGC | | | | | |
| | CTATCCAGCACCAGGACTGGATGAGTGGCAAAGAGTTCAAGTGCAAAGTGAACAACAAGGACCT | | | | | |
| | GCCTGCTCCAATTGAGAGAACCATCAGCAAGCCCAAGGGCTCTGTTAGAGCCCCTCAAGTGTAT | | | | | |
| | GTGCTGCCTCCACCTGAGGAAGAGATGACCAAGAAACAAGTGACCCTGACATGCATGGTCACAG | | | | | |
| | ACTTCATGCCTGAGGACATCTATGTGGAATGGACCAACAATGGCAAGACAGAGCTGAACTACAA | | | | | |
| | GAACACTGAGCCTGTGCTGGACTCTGATGGCAGCTACTTCATGTACAGCAAGCTGAGGGTTGAG | | | | | |
| | AAGAAGAACTGGGTTGAGAGAAACAGCTACAGCTGCTCTGTGGTGCATGAGGGCCTGCACAATC | | | | | |
| | ACCACACCACCAAGAGCTTCAGCAGAACCCCTGGCAAG | | | | | |
| 8H1- | 334 | 8H1 VL | 4GS4 | 8H1 VH | 9G Modified IgG2a | IgG2a |
| VL4VH- | | | | | Hinge | |
| 9GIgG2a | GAGATTGTGATGACACAGAGCCCTGGCACACTGTCTCTGAGCCCTGGGGAATCTGCCACACTGA | | | | | |
| | GCTGTAGAGCCAGCCAGTCTGTGTCTACCACCTACCTGGCCTGGTATCAGCAGAAGCCTGGACA | | | | | |
| | GGCTCCCAGACTGCTGATCTATGGGGCCTCTTCTAGAGCCACAGGCATCCCTGACAGATTTTCT | | | | | |
| | GGCAGTGGCTCTGGCACAGACTTCACCCTGACCATCAGCAGACTGGAACCTGAGGACTTTGCTG | | | | | |
| | TGTACTACTGCCAGCAGTATGGTGGCAGCAGGCTGATCACATTTGGCCAGGGCACAAGACTGGA | | | | | |
| | AATCAAGGGTGGAGGCGGTTCAGGCGGAGGTGGCAGCGGCGGTGGAGGGTCAGGTGGAGGTGGA | | | | | |
| | TCAGAGGTGCAGCTGGTGGAAAGTGGTGGTGGACTGGTTCAGCCTGGTGGCAGCCTGAGACTGT | | | | | |
| | CTTGTGCTGCCTCTGGCTTCACCTTCAGCATCTACACCATGAGCTGGGTCAGACAGGCTCCTGG | | | | | |
| | CAAAGGCCTGGAATGGGTGTCAGCTATCCTGTCTGATGGCAGCACCTACTATGCTGACTCTGTG | | | | | |
| | GAAGGCAGATTCACCATCAGCAGAGACAACAGCAAGACCACACTGTACCTGCAGATGAACAGCC | | | | | |
| | TGACAGCTGAGGACACTGCTGTGTACTACTGCACCAAGAGAGTGGAAGGCTCCTTCAGAGGCTG | | | | | |
| | GGGACAGGGAACACTGGTCACTGTGTCCTCTGGCGGAGGAGGCGGAGGTGGAGGAGGAGAGCCT | | | | | |
| | AGAGGCCCCACCATCAAGCCCTGTCCTCCATGCAAGTGTCCTGCTCCTAACCTGCTTGGAGGCC | | | | | |
| | CCTCTGTGTTCATCTTCCCACCTAAGATCAAGGATGTGCTGATGATCTCTCTGAGCCCCATTGT | | | | | |
| | GACCTGTGTGGTGGTGGATGTGTCTGAGGATGACCCTGATGTGCAGATCTCTTGGTTTGTGAAC | | | | | |
| | AATGTGGAAGTGCACACAGCCCAGACACAGACCCACAGAGAGGACTACAACAGCACCCTGAGAG | | | | | |
| | TGGTGTCTGCCCTGCCTATCCAGCACCAGGACTGGATGAGTGGCAAAGAGTTCAAGTGCAAAGT | | | | | |
| | GAACAACAAGGACCTGCCTGCTCCAATTGAGAGAACCATCAGCAAGCCCAAGGGCTCTGTTAGA | | | | | |
| | GCCCCTCAAGTGTATGTGCTGCCTCCACCTGAGGAAGAGATGACCAAGAAACAAGTGACCCTGA | | | | | |
| | CATGCATGGTCACAGACTTCATGCCTGAGGACATCTATGTGGAATGGACCAACAATGGCAAGAC | | | | | |
| | AGAGCTGAACTACAAGAACACTGAGCCTGTGCTGGACTCTGATGGCAGCTACTTCATGTACAGC | | | | | |
| | AAGCTGAGGGTTGAGAAGAAGAACTGGGTTGAGAGAAACAGCTACAGCTGCTCTGTGGTGCATG | | | | | |
| | AGGGCCTGCACAATCACCACACCACCAAGAGCTTCAGCAGAACCCCTGGCAAG | | | | | |
| 43A11- | 335 | 843A11 VH | 4GS2 | 43A11 VL | 9G Modified IgG2a | IgG2a |
| VH2VL- | | | | | Hinge | |
| 9GIgG2a | CAGGTCCAGCTGCAAGAGTCTGGCCCTGGACTGGTCAAGCCTTCTGGCACACTGAGCCTGACCT | | | | | |
| | GTGCTGTGACTGGTGGCAGCATCAGCAGCAGCAATTGGTGGTCTTGGGTCAGACAGAGCCCTGG | | | | | |
| | CAAAGGCCTGGAATGGATTGGAGAGATCCACCATGATGGCAACCTGAACTACAACCCTCTGCTG | | | | | |
| | AAGTCCAGAGTGTCCATGAGCCTGGACAGAAGCAAGAACCAGTTCAGCCTGAAGCTGACCTCTG | | | | | |
| | TGACAGCTGCTGACACTGCTGTGTACTACTGTGCCAGATGGGACTTCTTCTTTGACTCCTCCTA | | | | | |
| | CTACATCAGGGGCTTTGACCTGTGGGGCCAGGGCACAATGGTTACAGTGTCCTCTGGTGGAGGC | | | | | |
| | GGTTCAGGCGGAGGTGGCAGCGGCGGTGGAGGGTCAGGTGGAGGTGGATCAGAGACAACCCTGA | | | | | |
| | CACAGAGCCCTGGCACATTGTCTCTGAGCCCTGGGGAGAGAGTGACCCTGTCTTGTAGAGCCAG | | | | | |
| | CCAGTCTGTGGACAGAAACTACCTGGCCTGGTATCAGCAGAAGCCTGGCCAGTCTCCTAGACTG | | | | | |
| | CTGATCTACTCTGCCTCTAGGAGAGCCACAGGCATCCCTGACAGATTTTCTGGCAGTGGCTCTG | | | | | |
| | GCACAGACTTCACCCTGACCATCAGCAGACTGGAACCTGAGGACTTTGTGGTGTACTACTGCCA | | | | | |
| | GCAGTATGGTGGCAGCCCTCCTATCACATTTGGCCAGGGCACAAGACTGGAAATCAAGGGCGGA | | | | | |
| | GGAGGCGGAGGTGGAGGAGGAGAGCCTAGAGGCCCCACCATCAAGCCCTGTCCTCCATGCAAGT | | | | | |
| | GTCCTGCTCCTAACCTGCTTGGAGGCCCCTCTGTGTTCATCTTCCCACCTAAGATCAAGGATGT | | | | | |
| | GCTGATGATCTCTCTGAGCCCCATTGTGACCTGTGTGGTGGTGGATGTGTCTGAGGATGACCCT | | | | | |
| | GATGTGCAGATCTCTTGGTTTGTGAACAATGTGGAAGTGCACACAGCCCAGACACAGACCCACA | | | | | |
| | GAGAGGACTACAACAGCACCCTGAGAGTGGTGTCTGCCCTGCCTATCCAGCACCAGGACTGGAT | | | | | |
| | GAGTGGCAAAGAGTTCAAGTGCAAAGTGAACAACAAGGACCTGCCTGCTCCAATTGAGAGAACC | | | | | |
| | ATCAGCAAGCCCAAGGGCTCTGTTAGAGCCCCTCAAGTGTATGTGCTGCCTCCACCTGAGGAAG | | | | | |
| | AGATGACCAAGAAACAAGTGACCCTGACATGCATGGTCACAGACTTCATGCCTGAGGACATCTA | | | | | |
| | TGTGGAATGGACCAACAATGGCAAGACAGAGCTGAACTACAAGAACACTGAGCCTGTGCTGGAC | | | | | |
| | TCTGATGGCAGCTACTTCATGTACAGCAAGCTGAGGGTTGAGAAGAAGAACTGGGTTGAGAGAA | | | | | |
| | ACAGCTACAGCTGCTCTGTGGTGCATGAGGGCCTGCACAATCACCACACCACCAAGAGCTTCAG | | | | | |
| | CAGAACCCCTGGCAAG | | | | | |
| 43A11- | 336 | 43A11 VH | 4GS3 | 43A11 VL | 9G Modified IgG2a | IgG2a |
| VH3VL- | | | | | Hinge | |
| 9GIgG2a | CAGGTCCAGCTGCAAGAGTCTGGCCCTGGACTGGTCAAGCCTTCTGGCACACTGAGCCTGACCT | | | | | |
| | GTGCTGTGACTGGTGGCAGCATCAGCAGCAGCAATTGGTGGTCTTGGGTCAGACAGAGCCCTGG | | | | | |
| | CAAAGGCCTGGAATGGATTGGAGAGATCCACCATGATGGCAACCTGAACTACAACCCTCTGCTG | | | | | |
| | AAGTCCAGAGTGTCCATGAGCCTGGACAGAAGCAAGAACCAGTTCAGCCTGAAGCTGACCTCTG | | | | | |
| | TGACAGCTGCTGACACTGCTGTGTACTACTGTGCCAGATGGGACTTCTTCTTTGACTCCTCCTA | | | | | |
| | CTACATCAGGGGCTTTGACCTGTGGGGCCAGGGCACAATGGTTACAGTGTCCTCTGGTGGAGGC | | | | | |
| | GGTTCAGGCGGAGGTGGCAGCGGCGGTGGAGGGTCGGAGACAACCCTGACACAGAGCCCTGGCA | | | | | |
| | CATTGTCTCTGAGCCCTGGGGAGAGAGTGACCCTGTCTTGTAGAGCCAGCCAGTCTGTGGACAG | | | | | |
| | AAACTACCTGGCCTGGTATCAGCAGAAGCCTGGCCAGTCTCCTAGACTGCTGATCTACTCTGCC | | | | | |
| | TCTAGGAGAGCCACAGGCATCCCTGACAGATTTTCTGGCAGTGGCTCTGGCACAGACTTCACCC | | | | | |
| | TGACCATCAGCAGACTGGAACCTGAGGACTTTGTGGTGTACTACTGCCAGCAGTATGGTGGCAG | | | | | |
| | CCCTCCTATCACATTTGGCCAGGGCACAAGACTGGAAATCAAGGGCGGAGGAGGCGGAGGTGGA | | | | | |
| | GGAGGAGAGCCTAGAGGCCCCACCATCAAGCCCTGTCCTCCATGCAAGTGTCCTGCTCCTAACC | | | | | |
| | TGCTTGGAGGCCCCTCTGTGTTCATCTTCCCACCTAAGATCAAGGATGTGCTGATGATCTCTCT | | | | | |
| | GAGCCCCATTGTGACCTGTGTGGTGGTGGATGTGTCTGAGGATGACCCTGATGTGCAGATCTCT | | | | | |
| | TGGTTTGTGAACAATGTGGAAGTGCACACAGCCCAGACACAGACCCACAGAGAGGACTACAACA | | | | | |
| | GCACCCTGAGAGTGGTGTCTGCCCTGCCTATCCAGCACCAGGACTGGATGAGTGGCAAAGAGTT | | | | | |
| | CAAGTGCAAAGTGAACAACAAGGACCTGCCTGCTCCAATTGAGAGAACCATCAGCAAGCCCAAG | | | | | |
| | GGCTCTGTTAGAGCCCCTCAAGTGTATGTGCTGCCTCCACCTGAGGAAGAGATGACCAAGAAAC | | | | | |
| | AAGTGACCCTGACATGCATGGTCACAGACTTCATGCCTGAGGACATCTATGTGGAATGGACCAA | | | | | |
| | CAATGGCAAGACAGAGCTGAACTACAAGAACACTGAGCCTGTGCTGGACTCTGATGGCAGCTAC | | | | | |
| | TTCATGTACAGCAAGCTGAGGGTTGAGAAGAAGAACTGGGTTGAGAGAAACAGCTACAGCTGCT | | | | | |
| | CTGTGGTGCATGAGGGCCTGCACAATCACCACACCACCAAGAGCTTCAGCAGAACCCCTGGCAA | | | | | |
| | G | | | | | |
| 43A11- | 337 | 8H1 VH | 4GS4 | 43 A11VL | 9G Modified IgG2a | IgG2a |
| VH4VL- | | | | | Hinge | |
| 9GIgG2a | CAGGTCCAGCTGCAAGAGTCTGGCCCTGGACTGGTCAAGCCTTCTGGCACACTGAGCCTGACCT | | | | | |
| | GTGCTGTGACTGGTGGCAGCATCAGCAGCAGCAATTGGTGGTCTTGGGTCAGACAGAGCCCTGG | | | | | |
| | CAAAGGCCTGGAATGGATTGGAGAGATCCACCATGATGGCAACCTGAACTACAACCCTCTGCTG | | | | | |
| | AAGTCCAGAGTGTCCATGAGCCTGGACAGAAGCAAGAACCAGTTCAGCCTGAAGCTGACCTCTG | | | | | |
| | TGACAGCTGCTGACACTGCTGTGTACTACTGTGCCAGATGGGACTTCTTCTTTGACTCCTCCTA | | | | | |
| | CTACATCAGGGGCTTTGACCTGTGGGGCCAGGGCACAATGGTTACAGTGTCCTCTGGCGGAGGT | | | | | |
| | GGCAGCGGAGGTGGCGGATCAGAGACAACCCTGACACAGAGCCCTGGCACATTGTCTCTGAGCC | | | | | |
| | CTGGGGAGAGAGTGACCCTGTCTTGTAGAGCCAGCCAGTCTGTGGACAGAAACTACCTGGCCTG | | | | | |
| | GTATCAGCAGAAGCCTGGCCAGTCTCCTAGACTGCTGATCTACTCTGCCTCTAGGAGAGCCACA | | | | | |
| | GGCATCCCTGACAGATTTTCTGGCAGTGGCTCTGGCACAGACTTCACCCTGACCATCAGCAGAC | | | | | |
| | TGGAACCTGAGGACTTTGTGGTGTACTACTGCCAGCAGTATGGTGGCAGCCCTCCTATCACATT | | | | | |
| | TGGCCAGGGCACAAGACTGGAAATCAAGGGCGGAGGAGGCGGAGGTGGAGGAGGAGAGCCTAGA | | | | | |
| | GGCCCCACCATCAAGCCCTGTCCTCCATGCAAGTGTCCTGCTCCTAACCTGCTTGGAGGCCCCT | | | | | |
| | CTGTGTTCATCTTCCCACCTAAGATCAAGGATGTGCTGATGATCTCTCTGAGCCCCATTGTGAC | | | | | |
| | CTGTGTGGTGGTGGATGTGTCTGAGGATGACCCTGATGTGCAGATCTCTTGGTTTGTGAACAAT | | | | | |
| | GTGGAAGTGCACACAGCCCAGACACAGACCCACAGAGAGGACTACAACAGCACCCTGAGAGTGG | | | | | |
| | TGTCTGCCCTGCCTATCCAGCACCAGGACTGGATGAGTGGCAAAGAGTTCAAGTGCAAAGTGAA | | | | | |
| | CAACAAGGACCTGCCTGCTCCAATTGAGAGAACCATCAGCAAGCCCAAGGGCTCTGTTAGAGCC | | | | | |
| | CCTCAAGTGTATGTGCTGCCTCCACCTGAGGAAGAGATGACCAAGAAACAAGTGACCCTGACAT | | | | | |
| | GCATGGTCACAGACTTCATGCCTGAGGACATCTATGTGGAATGGACCAACAATGGCAAGACAGA | | | | | |
| | GCTGAACTACAAGAACACTGAGCCTGTGCTGGACTCTGATGGCAGCTACTTCATGTACAGCAAG | | | | | |
| | CTGAGGGTTGAGAAGAAGAACTGGGTTGAGAGAAACAGCTACAGCTGCTCTGTGGTGCATGAGG | | | | | |
| | GCCTGCACAATCACCACACCACCAAGAGCTTCAGCAGAACCCCTGGCAAG | | | | | |
| 43A11- | 338 | 43A11 VL | 4GS2 | 43A11 | 9G Modified IgG2a | IgG2a |
| VL2VH- | | | | VH | Hinge | |
| 9GIgG2a | GAGACAACCCTGACACAGAGCCCTGGCACATTGTCTCTGAGCCCTGGGGAGAGAGTGACCCTGT | | | | | |
| | CTTGTAGAGCCAGCCAGTCTGTGGACAGAAACTACCTGGCCTGGTATCAGCAGAAGCCTGGCCA | | | | | |
| | GTCTCCTAGACTGCTGATCTACTCTGCCTCTAGGAGAGCCACAGGCATCCCTGACAGATTTTCT | | | | | |
| | GGCAGTGGCTCTGGCACAGACTTCACCCTGACCATCAGCAGACTGGAACCTGAGGACTTTGTGG | | | | | |
| | TGTACTACTGCCAGCAGTATGGTGGCAGCCCTCCTATCACATTTGGCCAGGGCACAAGACTGGA | | | | | |
| | AATCAAGGGTGGAGGCGGTTCAGGCGGAGGTGGCAGCGGCGGTGGAGGGTCAGGTGGAGGTGGA | | | | | |
| | TCACAGGTCCAGCTGCAAGAGTCTGGCCCTGGACTGGTCAAGCCTTCTGGCACACTGAGCCTGA | | | | | |
| | CCTGTGCTGTGACTGGTGGCAGCATCAGCAGCAGCAATTGGTGGTCTTGGGTCAGACAGAGCCC | | | | | |
| | TGGCAAAGGCCTGGAATGGATTGGAGAGATCCACCATGATGGCAACCTGAACTACAACCCTCTG | | | | | |
| | CTGAAGTCCAGAGTGTCCATGAGCCTGGACAGAAGCAAGAACCAGTTCAGCCTGAAGCTGACCT | | | | | |
| | CTGTGACAGCTGCTGACACTGCTGTGTACTACTGTGCCAGATGGGACTTCTTCTTTGACTCCTC | | | | | |
| | CTACTACATCAGGGGCTTTGACCTGTGGGGCCAGGGCACAATGGTTACAGTGTCCTCTGGCGGA | | | | | |
| | GGAGGCGGAGGTGGAGGAGGAGAGCCTAGAGGCCCCACCATCAAGCCCTGTCCTCCATGCAAGT | | | | | |
| | GTCCTGCTCCTAACCTGCTTGGAGGCCCCTCTGTGTTCATCTTCCCACCTAAGATCAAGGATGT | | | | | |
| | GCTGATGATCTCTCTGAGCCCCATTGTGACCTGTGTGGTGGTGGATGTGTCTGAGGATGACCCT | | | | | |
| | GATGTGCAGATCTCTTGGTTTGTGAACAATGTGGAAGTGCACACAGCCCAGACACAGACCCACA | | | | | |
| | GAGAGGACTACAACAGCACCCTGAGAGTGGTGTCTGCCCTGCCTATCCAGCACCAGGACTGGAT | | | | | |
| | GAGTGGCAAAGAGTTCAAGTGCAAAGTGAACAACAAGGACCTGCCTGCTCCAATTGAGAGAACC | | | | | |
| | ATCAGCAAGCCCAAGGGCTCTGTTAGAGCCCCTCAAGTGTATGTGCTGCCTCCACCTGAGGAAG | | | | | |
| | AGATGACCAAGAAACAAGTGACCCTGACATGCATGGTCACAGACTTCATGCCTGAGGACATCTA | | | | | |
| | TGTGGAATGGACCAACAATGGCAAGACAGAGCTGAACTACAAGAACACTGAGCCTGTGCTGGAC | | | | | |
| | TCTGATGGCAGCTACTTCATGTACAGCAAGCTGAGGGTTGAGAAGAAGAACTGGGTTGAGAGAA | | | | | |
| | ACAGCTACAGCTGCTCTGTGGTGCATGAGGGCCTGCACAATCACCACACCACCAAGAGCTTCAG | | | | | |
| | CAGAACCCCTGGCAAG | | | | | |
| 43A11- | 339 | 43A11 VL | 4GS3 | 43A11 VH | 9G Modified IgG2a | IgG2a |
| VL3VH- | | | | | Hinge | |
| 9GIgG2a | GAGACAACCCTGACACAGAGCCCTGGCACATTGTCTCTGAGCCCTGGGGAGAGAGTGACCCTGT | | | | | |
| | CTTGTAGAGCCAGCCAGTCTGTGGACAGAAACTACCTGGCCTGGTATCAGCAGAAGCCTGGCCA | | | | | |
| | GTCTCCTAGACTGCTGATCTACTCTGCCTCTAGGAGAGCCACAGGCATCCCTGACAGATTTTCT | | | | | |
| | GGCAGTGGCTCTGGCACAGACTTCACCCTGACCATCAGCAGACTGGAACCTGAGGACTTTGTGG | | | | | |
| | TGTACTACTGCCAGCAGTATGGTGGCAGCCCTCCTATCACATTTGGCCAGGGCACAAGACTGGA | | | | | |
| | AATCAAGGGTGGAGGCGGTTCAGGCGGAGGTGGCAGCGGCGGTGGAGGGTCGCAGGTCCAGCTG | | | | | |
| | CAAGAGTCTGGCCCTGGACTGGTCAAGCCTTCTGGCACACTGAGCCTGACCTGTGCTGTGACTG | | | | | |
| | GTGGCAGCATCAGCAGCAGCAATTGGTGGTCTTGGGTCAGACAGAGCCCTGGCAAAGGCCTGGA | | | | | |
| | ATGGATTGGAGAGATCCACCATGATGGCAACCTGAACTACAACCCTCTGCTGAAGTCCAGAGTG | | | | | |
| | TCCATGAGCCTGGACAGAAGCAAGAACCAGTTCAGCCTGAAGCTGACCTCTGTGACAGCTGCTG | | | | | |
| | ACACTGCTGTGTACTACTGTGCCAGATGGGACTTCTTCTTTGACTCCTCCTACTACATCAGGGG | | | | | |
| | CTTTGACCTGTGGGGCCAGGGCACAATGGTTACAGTGTCCTCTGGCGGAGGAGGCGGAGGTGGA | | | | | |
| | GGAGGAGAGCCTAGAGGCCCCACCATCAAGCCCTGTCCTCCATGCAAGTGTCCTGCTCCTAACC | | | | | |
| | TGCTTGGAGGCCCCTCTGTGTTCATCTTCCCACCTAAGATCAAGGATGTGCTGATGATCTCTCT | | | | | |
| | GAGCCCCATTGTGACCTGTGTGGTGGTGGATGTGTCTGAGGATGACCCTGATGTGCAGATCTCT | | | | | |
| | TGGTTTGTGAACAATGTGGAAGTGCACACAGCCCAGACACAGACCCACAGAGAGGACTACAACA | | | | | |
| | GCACCCTGAGAGTGGTGTCTGCCCTGCCTATCCAGCACCAGGACTGGATGAGTGGCAAAGAGTT | | | | | |
| | CAAGTGCAAAGTGAACAACAAGGACCTGCCTGCTCCAATTGAGAGAACCATCAGCAAGCCCAAG | | | | | |
| | GGCTCTGTTAGAGCCCCTCAAGTGTATGTGCTGCCTCCACCTGAGGAAGAGATGACCAAGAAAC | | | | | |
| | AAGTGACCCTGACATGCATGGTCACAGACTTCATGCCTGAGGACATCTATGTGGAATGGACCAA | | | | | |
| | CAATGGCAAGACAGAGCTGAACTACAAGAACACTGAGCCTGTGCTGGACTCTGATGGCAGCTAC | | | | | |
| | TTCATGTACAGCAAGCTGAGGGTTGAGAAGAAGAACTGGGTTGAGAGAAACAGCTACAGCTGCT | | | | | |
| | CTGTGGTGCATGAGGGCCTGCACAATCACCACACCACCAAGAGCTTCAGCAGAACCCCTGGCAA | | | | | |
| | G | | | | | |
| 43A11- | 340 | 43A11 VL | 4GS4 | 43A11 VH | 9G Modified IgG2a | IgG2a |
| VL4VH- | | | | | Hinge | |

| | |
|---|---|
| 9GIgG2a | GAGACAACCCTGACACAGAGCCCTGGCACATTGTCTCTGAGCCCTGGGGAGAGAGTGACCCTGT |
| | CTTGTAGAGCCAGCCAGTCTGTGGACAGAAACTACCTGGCCTGGTATCAGCAGAAGCCTGGCCA |
| | GTCTCCTAGACTGCTGATCTACTCTGCCTCTAGGAGAGCCACAGGCATCCCTGACAGATTTTCT |
| | GGCAGTGGCTCTGGCACAGACTTCACCCTGACCATCAGCAGACTGGAACCTGAGGACTTTGTGG |
| | TGTACTACTGCCAGCAGTATGGTGGCAGCCCTCCTATCACATTTGGCCAGGGCACAAGACTGGA |
| | AATCAAGGGCGGAGGTGGCAGCGGAGGTGGCGGATCACAGGTCCAGCTGCAAGAGTCTGGCCCT |
| | GGACTGGTCAAGCCTTCTGGCACACTGAGCCTGACCTGTGCTGTGACTGGTGGCAGCATCAGCA |
| | GCAGCAATTGGTGGTCTTGGGTCAGACAGAGCCCTGGCAAAGGCCTGGAATGGATTGGAGAGAT |
| | CCACCATGATGGCAACCTGAACTACAACCCTCTGCTGAAGTCCAGAGTGTCCATGAGCCTGGAC |
| | AGAAGCAAGAACCAGTTCAGCCTGAAGCTGACCTCTGTGACAGCTGCTGACACTGCTGTGTACT |
| | ACTGTGCCAGATGGGACTTCTTCTTTGACTCCTCCTACTACATCAGGGGCTTTGACCTGTGGGG |
| | CCAGGGCACAATGGTTACAGTGTCCTCTGGCGGAGGAGGCGGAGGTGGAGGAGGAGAGCCTAGA |
| | GGCCCCACCATCAAGCCCTGTCCTCCATGCAAGTGTCCTGCTCCTAACCTGCTTGGAGGCCCCT |
| | CTGTGTTCATCTTCCCACCTAAGATCAAGGATGTGCTGATGATCTCTCTGAGCCCCATTGTGAC |
| | CTGTGTGGTGGTGGATGTGTCTGAGGATGACCCTGATGTGCAGATCTCTTGGTTTGTGAACAAT |
| | GTGGAAGTGCACACAGCCCAGACACAGACCCACAGAGAGGACTACAACAGCACCCTGAGAGTGG |
| | TGTCTGCCCTGCCTATCCAGCACCAGGACTGGATGAGTGGCAAAGAGTTCAAGTGCAAAGTGAA |
| | CAACAAGGACCTGCCTGCTCCAATTGAGAGAACCATCAGCAAGCCCAAGGGCTCTGTTAGAGCC |
| | CCTCAAGTGTATGTGCTGCCTCCACCTGAGGAAGAGATGACCAAGAAACAAGTGACCCTGACAT |
| | GCATGGTCACAGACTTCATGCCTGAGGACATCTATGTGGAATGGACCAACAATGGCAAGACAGA |
| | GCTGAACTACAAGAACACTGAGCCTGTGCTGGACTCTGATGGCAGCTACTTCATGTACAGCAAG |
| | CTGAGGGTTGAGAAGAAGAACTGGGTTGAGAGAAACAGCTACAGCTGCTCTGTGGTGCATGAGG |
| | GCCTGCACAATCACCACACCACCAAGAGCTTCAGCAGAACCCCTGGCAAG |

[0384] Table F shows exemplary anti-Tau ScFv-Fc constructs. In these constructs the VH of the anti-Tau mAb is upstream of the VL, with a 3xG4S linker between the variable regions (“VH3VL”). A 9 glycine (9G) linker is placed upstream of the Fc domain so itis between the scFv and the Fc domain. The sequences provided include the nucleotide sequence encoding the scFv-Fc, regulatory elements, such as the CAG promoter and polyA signal, flanked by ITR sequences, the nucleotide sequence encoding the scFv-Fc construct (including the signal sequence), and the amino acid sequence.

TABLE 11F
ScFv-Fc Constructs and Components

| Construct | |
|---|---|
| or | |
| Componentt | Sequence |
| 4P3-HL-L3 | CTGCGCGCTCGCTCGCTCACTGAGGCCGCCCGGGCAAAGCCCGGGCGTCGGGCG |
| scFv-Fc (ITR to | ACCTTTGGTCGCCCGGCCTCAGTGAGCGAGCGAGCGCGCAGAGAGGGAGTGGCC |
| ITR) | AACTCCATCACTAGGGGTTCCTTGTAGTTAATGATTAACCCGCCATGCTACTTA |
| | TCTACCAGGGTAATGGGGATCCTCTAGAACTATAGCTAGTCGACATTGATTATT |
| | GACTAGTTATTAATAGTAATCAATTACGGGGTCATTAGTTCATAGCCCATATAT |
| | GGAGTTCCGCGTTACATAACTTACGGTAAATGGCCCGCCTGGCTGACCGCCCAA |
| | CGACCCCCGCCCATTGACGTCAATAATGACGTATGTTCCCATAGTAACGCCAAT |
| | AGGGACTTTCCATTGACGTCAATGGGTGGAGTATTTACGGTAAACTGCCCACTT |
| | GGCAGTACATCAAGTGTATCATATGCCAAGTACGCCCCCTATTGACGTCAATGA |
| | CGGTAAATGGCCCGCCTGGCATTATGCCCAGTACATGACCTTATGGGACTTTCC |
| | TACTTGGCAGTACATCTACGTATTAGTCATCGCTATTACCATGGTCGAGGTGAG |
| | CCCCACGTTCTGCTTCACTCTCCCCATCTCCCCCCCCTCCCCACCCCCAATTTT |
| | GTATTTATTTATTTTTTAATTATTTTGTGCAGCGATGGGGGCGGGGGGGGGGGG |
| | GGGGCGCGCGCCAGGCGGGGCGGGGCGGGGCGAGGGGCGGGGCGGGGCGAGGCG |
| | GAGAGGTGCGGCGGCAGCCAATCAGAGCGGCGCGCTCCGAAAGTTTCCTTTTAT |
| | GGCGAGGCGGCGGCGGCGGCGGCCCTATAAAAAGCGAAGCGCGCGGCGGGCGGG |
| | AGTCGCTGCGCGCTGCCTTCGCCCCGTGCCCCGCTCCGCCGCCGCCTCGCGCCG |
| | CCCGCCCCGGCTCTGACTGACCGCGTTACTCCCACAGGTGAGCGGGCGGGACGG |
| | CCCTTCTCCTCCGGGCTGTAATTAGCGCTTGGTTTAATGACGGCTTGTTTCTTT |
| | TCTGTGGCTGCGTGAAAGCCTTGAGGGGCTCCGGGAGGGCCCTTTGTGCGGGGG |
| | GAGCGGCTCGGGGGGTGCGTGCGTGTGTGTGTGCGTGGGGAGCGCCGCGTGCGG |
| | CTCCGCGCTGCCCGGCGGCTGTGAGCGCTGCGGGCGCGGCGCGGGGCTTTGTGC |
| | GCTCCGCAGTGTGCGCGAGGGGAGCGCGGCCGGGGGCGGTGCCCCGCGGTGCGG |
| | GGGGGGCTGCGAGGGGAACAAAGGCTGCGTGCGGGGTGTGTGCGTGGGGGGGTG |
| | AGCAGGGGGTGTGGGCGCGTCGGTCGGGCTGCAACCCCCCCTGCACCCCCCTCC |
| | CCGAGTTGCTGAGCACGGCCCGGCTTCGGGTGCGGGGCTCCGTACGGGGCGTGG |
| | CGCGGGGCTCGCCGTGCCGGGCGGGGGGTGGCGGCAGGTGGGGGTGCCGGGCGG |
| | GGCGGGGCCGCCTCGGGCCGGGGAGGGCTCGGGGGAGGGGCGCGGCGGCCCCCG |
| | GAGCGCCGGCGGCTGTCGAGGCGCGGCGAGCCGCAGCCATTGCCTTTTATGGTA |
| | ATCGTGCGAGAGGGCGCAGGGACTTCCTTTGTCCCAAATCTGTGCGGAGCCGAA |
| | ATCTGGGAGGCGCCGCCGCACCCCCTCTAGCGGGCGCGGGGCGAAGCGGTGCGG |
| | CGCCGGCAGGAAGGAAATGGGCGGGGAGGGCCTTCGTGCGTCGCCGCGCCGCCG |
| | TCCCCTTCTCCCTCTCCAGCCTCGGGGCTGTCCGCGGGGGGACGGCTGCCTTCG |
| | GGGGGGACGGGGCAGGGCGGGGTTCGGCTTCTGGCGTGTGACCGGCGGCTCTAG |
| | AGCCTCTGCTAACCATGTTCATGCCTTCTTCTTTTTCCTACAGCTCCTGGGCAA |
| | CGTGCTGGTTATTGTGCTGTCTCATCATTTTGGCAAAGAATTCGCCACCATGTA |
| | CAGAATGCAGCTGCTGCTGCTCATTGCCCTGTCTCTGGCCCTGGTCACCAATTC |
| | TGAGGTGCAGCTGGTGCAGTCTGGGGCTGAAGTGAAGAAGCCTGGGGAGAGCCT |
| | GAAGATCAGCTGCAAAGTGTCTGGCTATGACTTCAGCAAGTACTGGATTGGCTG |
| | GGTCAGACAGATGCCTGGCAAAGGCCTGGAATGGATGGGACTGATCTACCCTGG |
| | GGACTCTGACACCAGATACAGCCCTAGCCTGGAAGGCCAGGTGTCCATCTCTGC |
| | TGACAAGAGCATCTCTGCAGCCTACCTGCAGTTCAGCAGCCTGAAGGCCTCTGA |
| | CTCTGCCATGTACTACTGTGTCAGAAAGGGCTACTCTGCCTACCTTGGAGGATG |
| | GTTTGATCCTTGGGGCCAGGGCACACTGGTCACAGTGTCCTCTGGTGGAGGCGG |
| | TTCAGGCGGAGGTGGCAGCGGCGGTGGAGGGTCGGACATCCAGCTGACACAGAG |
| | CCCTGACAGCCTGGCTGCTTCTCTGGGAGAGAGAGTGACCATCAACTGCAGAAG |
| | CTCCCAGAACATCTTCTACAACAGCAACAACAAGAACTTCCTGGCCTGGTATCA |
| | GCAGAAGGCTGGCCAGTCTCCTAAGCTGCTGATCTACTGGGCCAGCACCAGAGA |
| | ATCTGGGGTGCCAGATAGATTTTCTGGCAGTGGCTCTGGCACAGACTTCACCCT |
| | GACAATCAGTGGACTGCAGGCTGGGGATGTTGCTGTGTACTTCTGCCAGCAGTA |
| | CTTCACAGATGCCCCTACCTTTGGTGGTGGCACCAAGGTGGAAATCAAGGGCGG |
| | AGGAGGCGGAGGTGGAGGAGGAGAGCCTAGAGGCCCCACCATCAAGCCCTGTCC |
| | TCCATGCAAGTGTCCTGCTCCTAACCTGCTTGGAGGCCCCTCTGTGTTCATCTT |
| | CCCACCTAAGATCAAGGATGTGCTGATGATCTCTCTGAGCCCCATTGTGACCTG |
| | TGTGGTGGTGGATGTGTCTGAGGATGACCCTGATGTGCAGATCTCTTGGTTTGT |
| | GAACAATGTGGAAGTGCACACAGCCCAGACACAGACCCACAGAGAGGACTACAA |
| | CAGCACCCTGAGAGTGGTGTCTGCCCTGCCTATCCAGCACCAGGACTGGATGAG |
| | TGGCAAAGAGTTCAAGTGCAAAGTGAACAACAAGGACCTGCCTGCTCCAATTGA |
| | GAGAACCATCAGCAAGCCCAAGGGCTCTGTTAGAGCCCCTCAAGTGTATGTGCT |
| | GCCTCCACCTGAGGAAGAGATGACCAAGAAACAAGTGACCCTGACATGCATGGT |
| | CACAGACTTCATGCCTGAGGACATCTATGTGGAATGGACCAACAATGGCAAGAC |
| | AGAGCTGAACTACAAGAACACTGAGCCTGTGCTGGACTCTGATGGCAGCTACTT |
| | CATGTACAGCAAGCTGAGGGTTGAGAAGAAGAACTGGGTTGAGAGAAACAGCTA |
| | CAGCTGCTCTGTGGTGCATGAGGGCCTGCACAATCACCACACCACCAAGAGCTT |
| | CAGCAGAACCCCTGGCAAGTAATGACTCGAGGACGGGGTGAACTACGCCTGAGG |
| | ATCCGATCTTTTTCCCTCTGCCAAAAATTATGGGGACATCATGAAGCCCCTTGA |
| | GCATCTGACTTCTGGCTAATAAAGGAAATTTATTTTCATTGCAATAGTGTGTTG |
| | GAATTTTTTGTGTCTCTCACTCGGAAGCAATTCGTTGATCTGAATTTCGACCAC |
| | CCATAATACCCATTACCCTGGTAGATAAGTAGCATGGCGGGTTAATCATTAACT |
| | ACAAGGAACCCCTAGTGATGGAGTTGGCCACTCCCTCTCTGCGCGCTCGCTCGC |
| | TCACTGAGGCCGGGCGACCAAAGGTCGCCCGACGCCCGGGCTTTGCCCGGGCGG |
| | CCTCAGTGAGCGAGCGAGCGCGCAG (SEQ ID NO: 369) |
| 4p3 ScFv-Fc | ATGTACAGAATGCAGCTGCTGCTGCTCATTGCCCTGTCTCTGGCCCTGGTCACC |
| polynucleotide | AATTCTGAGGTGCAGCTGGTGCAGTCTGGGGCTGAAGTGAAGAAGCCTGGGGAG |
| (includes signal | AGCCTGAAGATCAGCTGCAAAGTGTCTGGCTATGACTTCAGCAAGTACTGGATT |
| peptide): | GGCTGGGTCAGACAGATGCCTGGCAAAGGCCTGGAATGGATGGGACTGATCTAC |
| (mIL2-4P3- | CCTGGGGACTCTGACACCAGATACAGCCCTAGCCTGGAAGGCCAGGTGTCCATC |
| VH3VL-9IgG2a) | TCTGCTGACAAGAGCATCTCTGCAGCCTACCTGCAGTTCAGCAGCCTGAAGGCC |
| | TCTGACTCTGCCATGTACTACTGTGTCAGAAAGGGCTACTCTGCCTACCTTGGA |
| | GGATGGTTTGATCCTTGGGGCCAGGGCACACTGGTCACAGTGTCCTCTGGTGGA |
| | GGCGGTTCAGGCGGAGGTGGCAGCGGCGGTGGAGGGTCGGACATCCAGCTGACA |
| | CAGAGCCCTGACAGCCTGGCTGCTTCTCTGGGAGAGAGAGTGACCATCAACTGC |
| | AGAAGCTCCCAGAACATCTTCTACAACAGCAACAACAAGAACTTCCTGGCCTGG |
| | TATCAGCAGAAGGCTGGCCAGTCTCCTAAGCTGCTGATCTACTGGGCCAGCACC |
| | AGAGAATCTGGGGTGCCAGATAGATTTTCTGGCAGTGGCTCTGGCACAGACTTC |
| | ACCCTGACAATCAGTGGACTGCAGGCTGGGGATGTTGCTGTGTACTTCTGCCAG |
| | CAGTACTTCACAGATGCCCCTACCTTTGGTGGTGGCACCAAGGTGGAAATCAAG |
| | GGCGGAGGAGGCGGAGGTGGAGGAGGAGAGCCTAGAGGCCCCACCATCAAGCCC |
| | TGTCCTCCATGCAAGTGTCCTGCTCCTAACCTGCTTGGAGGCCCCTCTGTGTTC |
| | ATCTTCCCACCTAAGATCAAGGATGTGCTGATGATCTCTCTGAGCCCCATTGTG |
| | ACCTGTGTGGTGGTGGATGTGTCTGAGGATGACCCTGATGTGCAGATCTCTTGG |
| | TTTGTGAACAATGTGGAAGTGCACACAGCCCAGACACAGACCCACAGAGAGGAC |
| | TACAACAGCACCCTGAGAGTGGTGTCTGCCCTGCCTATCCAGCACCAGGACTGG |
| | ATGAGTGGCAAAGAGTTCAAGTGCAAAGTGAACAACAAGGACCTGCCTGCTCCA |
| | ATTGAGAGAACCATCAGCAAGCCCAAGGGCTCTGTTAGAGCCCCTCAAGTGTAT |
| | GTGCTGCCTCCACCTGAGGAAGAGATGACCAAGAAACAAGTGACCCTGACATGC |
| | ATGGTCACAGACTTCATGCCTGAGGACATCTATGTGGAATGGACCAACAATGGC |
| | AAGACAGAGCTGAACTACAAGAACACTGAGCCTGTGCTGGACTCTGATGGCAGC |
| | TACTTCATGTACAGCAAGCTGAGGGTTGAGAAGAAGAACTGGGTTGAGAGAAAC |
| | AGCTACAGCTGCTCTGTGGTGCATGAGGGCCTGCACAATCACCACACCACCAAG |
| | AGCTTCAGCAGAACCCCTGGCAAG (SEQ ID NO: 370) |
| Full 4p3 ScFv-Fc | MYRMQLLLLIALSLALVINSEVQLVQSGAEVKKPGESLKISCKVSGYDESKYWI |
| polypeptide | GWVRQMPGKGLEWMGLIYPGDSDTRYSPSLEGQVSISADKSISAAYLQFSSLKA |
| (includes signal | SDSAMYYCVRKGYSAYLGGWFDPWGQGTLVTVSSGGGGSGGGGSGGGGSDIQLT |
| peptide) | QSPDSLAASLGERVTINCRSSQNIFYNSNNKNFLAWYQQKAGQSPKLLIYWAST |
| | RESGVPDRFSGSGSGTDFTLTISGLQAGDVAVYFCQQYFTDAPTFGGGTKVEIK |
| | GGGGGGGGGEPRGPTIKPCPPCKCPAPNLLGGPSVFIFPPKIKDVLMISLSPIV |
| | TCVVVDVSEDDPDVQISWFVNNVEVHTAQTQTHREDYNSTLRVVSALPIQHQDW |
| | MSGKEFKCKVNNKDLPAPIERTISKPKGSVRAPQVYVLPPPEEEMTKKQVTLTC |
| | MVTDFMPEDIYVEWTNNGKTELNYKNTEPVLDSDGSYFMYSKLRVEKKNWVERN |
| | SYSCSVVHEGLHNHHTTKSFSRTPGK (SEQ ID NO: 371) |
| | Bold/underline = 3xG4S linker |
| | Underline = 9G linker |
| Full 4p3 ScFv-Fc | CTGCGCGCTCGCTCGCTCACTGAGGCCGCCCGGGCAAAGCCCGGGCGTCGGGCG |
| polypeptide | ACCTTTGGTCGCCCGGCCTCAGTGAGCGAGCGAGCGCGCAGAGAGGGAGTGGCC |
| (includes signal | AACTCCATCACTAGGGGTTCCTTGTAGTTAATGATTAACCCGCCATGCTACTTA |
| peptide) | TCTACCAGGGTAATGGGGATCCTCTAGAACTATAGCTAGTCGACATTGATTATT |
| | GACTAGTTATTAATAGTAATCAATTACGGGGTCATTAGTTCATAGCCCATATAT |
| | GGAGTTCCGCGTTACATAACTTACGGTAAATGGCCCGCCTGGCTGACCGCCCAA |
| | CGACCCCCGCCCATTGACGTCAATAATGACGTATGTTCCCATAGTAACGCCAAT |
| | AGGGACTTTCCATTGACGTCAATGGGTGGAGTATTTACGGTAAACTGCCCACTT |
| | GGCAGTACATCAAGTGTATCATATGCCAAGTACGCCCCCTATTGACGTCAATGA |
| | CGGTAAATGGCCCGCCTGGCATTATGCCCAGTACATGACCTTATGGGACTTTCC |
| | TACTTGGCAGTACATCTACGTATTAGTCATCGCTATTACCATGGTCGAGGTGAG |
| | CCCCACGTTCTGCTTCACTCTCCCCATCTCCCCCCCCTCCCCACCCCCAATTTT |
| | GTATTTATTTATTTTTTAATTATTTTGTGCAGCGATGGGGGCGGGGGGGGGGGG |
| | GGGGCGCGCGCCAGGCGGGGCGGGGCGGGGCGAGGGGCGGGGCGGGGCGAGGCG |
| | GAGAGGTGCGGCGGCAGCCAATCAGAGCGGCGCGCTCCGAAAGTTTCCTTTTAT |
| | GGCGAGGCGGCGGCGGCGGCGGCCCTATAAAAAGCGAAGCGCGCGGCGGGCGGG |
| | AGTCGCTGCGCGCTGCCTTCGCCCCGTGCCCCGCTCCGCCGCCGCCTCGCGCCG |
| | CCCGCCCCGGCTCTGACTGACCGCGTTACTCCCACAGGTGAGCGGGCGGGACGG |
| | CCCTTCTCCTCCGGGCTGTAATTAGCGCTTGGTTTAATGACGGCTTGTTTCTTT |
| | TCTGTGGCTGCGTGAAAGCCTTGAGGGGCTCCGGGAGGGCCCTTTGTGCGGGGG |
| | GAGCGGCTCGGGGGGTGCGTGCGTGTGTGTGTGCGTGGGGAGCGCCGCGTGCGG |
| | CTCCGCGCTGCCCGGCGGCTGTGAGCGCTGCGGGCGCGGCGCGGGGCTTTGTGC |
| | GCTCCGCAGTGTGCGCGAGGGGAGCGCGGCCGGGGGCGGTGCCCCGCGGTGCGG |
| | GGGGGGCTGCGAGGGGAACAAAGGCTGCGTGCGGGGTGTGTGCGTGGGGGGGTG |
| | AGCAGGGGGTGTGGGCGCGTCGGTCGGGCTGCAACCCCCCCTGCACCCCCCTCC |
| | CCGAGTTGCTGAGCACGGCCCGGCTTCGGGTGCGGGGCTCCGTACGGGGCGTGG |
| | CGCGGGGCTCGCCGTGCCGGGCGGGGGGTGGCGGCAGGTGGGGGTGCCGGGCGG |
| | GGCGGGGCCGCCTCGGGCCGGGGAGGGCTCGGGGGAGGGGCGCGGCGGCCCCCG |
| | GAGCGCCGGCGGCTGTCGAGGCGCGGCGAGCCGCAGCCATTGCCTTTTATGGTA |
| | ATCGTGCGAGAGGGCGCAGGGACTTCCTTTGTCCCAAATCTGTGCGGAGCCGAA |
| | ATCTGGGAGGCGCCGCCGCACCCCCTCTAGCGGGCGCGGGGCGAAGCGGTGCGG |
| | CGCCGGCAGGAAGGAAATGGGGGGGGAGGGCCTTCGTGCGTCGCCGCGCCGCCG |
| | TCCCCTTCTCCCTCTCCAGCCTCGGGGCTGTCCGCGGGGGGACGGCTGCCTTCG |
| | GGGGGGACGGGGCAGGGCGGGGTTCGGCTTCTGGCGTGTGACCGGCGGCTCTAG |
| | AGCCTCTGCTAACCATGTTCATGCCTTCTTCTTTTTCCTACAGCTCCTGGGCAA |
| | CGTGCTGGTTATTGTGCTGTCTCATCATTTTGGCAAAGAATTCGCCACCATGTA |
| | CAGAATGCAGCTGCTGCTGCTCATTGCCCTGTCTCTGGCCCTGGTCACCAATTC |
| | TGAGGTGCAGCTGCTGCAGAGTGGTGGTGGTGTTGTGCAGCCTGGTGGCTCTCT |
| | GAGACTGTCTTGTGAAGCCTCTGGCTTCACCTTCAGCAGCTACAGCATGCACTG |
| | GGTCAGACAGGCCCCTGGCAAAGGACTGGAATGGCTGACCCTGATCAGCTACAA |
| | TGGGGTCAACAAGTACTATGCCAAGTCTGTGAAGGGCAGATTTGCCATCAGCAG |
| | AGATGACAGCAAGTCTACCCTGTTCCTGCAGATGAACAGCCTGACCACAGATGA |
| | CACTGCTGTGTACTACTGTGCCAGATGTCCCATTCCTAGAGCTGCCAGCTACAG |
| | AAATGGGGACAACTACTTTGAGTTTGGCCAGGGCACCCTGGTCACAGTGTCCTC |
| | TGGTGGAGGCGGTTCAGGCGGAGGTGGCAGCGGCGGTGGAGGGTCGCAGGCTGT |
| | GGTCACCCAAGAGCCTAGCCTGTCTGTGTCTCCTGGTGGCACAGTGACACTGAC |
| | ATGTGCCCTGTCCTCTGCCTCTGTGTCTACCAGCAGCTACCCCAGCTGGTATCA |
| | GCAGACACCTGGCCAGCCTCCAAGAATGCTGATCCACAACACAGACACCAGATC |
| | CTCTGGGGTGCCAGACAGATTCTCTGGCAGCATCCTGGGCAAGAAGGCTGCCCT |
| | GACAATCACTGGTGCCCAGGCTGATGATGAGTCTGACTACTACTGTGTGGTGTA |
| | CCTTGGCAATGGCTTCTGGGTGTTTGGTGGTGGCACCAAGCTGACAGTGCTGGG |
| | CGGAGGAGGCGGAGGTGGAGGAGGAGAGCCTAGAGGCCCCACCATCAAGCCCTG |
| | TCCTCCATGCAAGTGTCCTGCTCCTAACCTGCTTGGAGGCCCCTCTGTGTTCAT |
| | CTTCCCACCTAAGATCAAGGATGTGCTGATGATCTCTCTGAGCCCCATTGTGAC |
| | CTGTGTGGTGGTGGATGTGTCTGAGGATGACCCTGATGTGCAGATCTCTTGGTT |
| | TGTGAACAATGTGGAAGTGCACACAGCCCAGACACAGACCCACAGAGAGGACTA |
| | CAACAGCACCCTGAGAGTGGTGTCTGCCCTGCCTATCCAGCACCAGGACTGGAT |
| | GAGTGGCAAAGAGTTCAAGTGCAAAGTGAACAACAAGGACCTGCCTGCTCCAAT |
| | TGAGAGAACCATCAGCAAGCCCAAGGGCTCTGTTAGAGCCCCTCAAGTGTATGT |
| | GCTGCCTCCACCTGAGGAAGAGATGACCAAGAAACAAGTGACCCTGACATGCAT |
| | GGTCACAGACTTCATGCCTGAGGACATCTATGTGGAATGGACCAACAATGGCAA |
| | GACAGAGCTGAACTACAAGAACACTGAGCCTGTGCTGGACTCTGATGGCAGCTA |
| | CTTCATGTACAGCAAGCTGAGGGTTGAGAAGAAGAACTGGGTTGAGAGAAACAG |
| | CTACAGCTGCTCTGTGGTGCATGAGGGCCTGCACAATCACCACACCACCAAGAG |
| | CTTCAGCAGAACCCCTGGCAAGTAATGACTCGAGGACGGGGTGAACTACGCCTG |
| | AGGATCCGATCTTTTTCCCTCTGCCAAAAATTATGGGGACATCATGAAGCCCCT |
| | TGAGCATCTGACTTCTGGCTAATAAAGGAAATTTATTTTCATTGCAATAGTGTG |
| | TTGGAATTTTTTGTGTCTCTCACTCGGAAGCAATTCGTTGATCTGAATTTCGAC |
| | CACCCATAATACCCATTACCCTGGTAGATAAGTAGCATGGCGGGTTAATCATTA |
| | ACTACAAGGAACCCCTAGTGATGGAGTTGGCCACTCCCTCTCTGCGCGCTCGCT |
| | CGCTCACTGAGGCCGGGCGACCAAAGGTCGCCCGACGCCCGGGCTTTGCCCGGG |
| | CGGCCTCAGTGAGCGAGCGAGCGCGCAG (SEQ ID NO: 372) |
| 31B6 ScFv-Fc | ATGTACAGAATGCAGCTGCTGCTGCTCATTGCCCTGTCTCTGGCCCTGGTCACC |
| polynucleotide | AATTCTGAGGTGCAGCTGCTGCAGAGTGGTGGTGGTGTTGTGCAGCCTGGTGGC |
| (includes signal | TCTCTGAGACTGTCTTGTGAAGCCTCTGGCTTCACCTTCAGCAGCTACAGCATG |
| peptide) | CACTGGGTCAGACAGGCCCCTGGCAAAGGACTGGAATGGCTGACCCTGATCAGC |
| (mIL2-31B6- | TACAATGGGGTCAACAAGTACTATGCCAAGTCTGTGAAGGGCAGATTTGCCATC |
| VH3VL- | AGCAGAGATGACAGCAAGTCTACCCTGTTCCTGCAGATGAACAGCCTGACCACA |
| 9GIgG2a) | GATGACACTGCTGTGTACTACTGTGCCAGATGTCCCATTCCTAGAGCTGCCAGC |
| | TACAGAAATGGGGACAACTACTTTGAGTTTGGCCAGGGCACCCTGGTCACAGTG |
| | TCCTCTggtggaggcggttcaggcggaggtggcagcggcggtggagggtcgCAG |
| | GCTGTGGTCACCCAAGAGCCTAGCCTGTCTGTGTCTCCTGGTGGCACAGTGACA |
| | CTGACATGTGCCCTGTCCTCTGCCTCTGTGTCTACCAGCAGCTACCCCAGCTGG |
| | TATCAGCAGACACCTGGCCAGCCTCCAAGAATGCTGATCCACAACACAGACACC |
| | AGATCCTCTGGGGTGCCAGACAGATTCTCTGGCAGCATCCTGGGCAAGAAGGCT |
| | GCCCTGACAATCACTGGTGCCCAGGCTGATGATGAGTCTGACTACTACTGTGTG |
| | GTGTACCTTGGCAATGGCTTCTGGGTGTTTGGTGGTGGCACCAAGCTGACAGTG |
| | CTGGGCGGAGGAGGCGGAGGTGGAGGAGGAGAGCCTAGAGGCCCCACCATCAAG |
| | CCCTGTCCTCCATGCAAGTGTCCTGCTCCTAACCTGCTTGGAGGCCCCTCTGTG |
| | TTCATCTTCCCACCTAAGATCAAGGATGTGCTGATGATCTCTCTGAGCCCCATT |
| | GTGACCTGTGTGGTGGTGGATGTGTCTGAGGATGACCCTGATGTGCAGATCTCT |
| | TGGTTTGTGAACAATGTGGAAGTGCACACAGCCCAGACACAGACCCACAGAGAG |
| | GACTACAACAGCACCCTGAGAGTGGTGTCTGCCCTGCCTATCCAGCACCAGGAC |
| | TGGATGAGTGGCAAAGAGTTCAAGTGCAAAGTGAACAACAAGGACCTGCCTGCT |
| | CCAATTGAGAGAACCATCAGCAAGCCCAAGGGCTCTGTTAGAGCCCCTCAAGTG |
| | TATGTGCTGCCTCCACCTGAGGAAGAGATGACCAAGAAACAAGTGACCCTGACA |
| | TGCATGGTCACAGACTTCATGCCTGAGGACATCTATGTGGAATGGACCAACAAT |
| | GGCAAGACAGAGCTGAACTACAAGAACACTGAGCCTGTGCTGGACTCTGATGGC |
| | AGCTACTTCATGTACAGCAAGCTGAGGGTTGAGAAGAAGAACTGGGTTGAGAGA |
| | AACAGCTACAGCTGCTCTGTGGTGCATGAGGGCCTGCACAATCACCACACCACC |
| | AAGAGCTTCAGCAGAACCCCTGGCAAG (SEQ ID NO: 373) |
| Full 31B6 ScFv- | MYRMQLLLLIALSLALVINSEVQLLQSGGGVVQPGGSLRLSCEASGFTFSSYSM |
| Fc polypeptide | HWVRQAPGKGLEWLTLISYNGVNKYYAKSVKGRFAISRDDSKSTLFLQMNSLTT |
| (includes signal | DDTAVYYCARCPIPRAASYRNGDNYFEFGQGTLVTVSSGGGGSGGGGSGGGGSQ |
| peptide): | AVVTQEPSLSVSPGGTVTLTCALSSASVSTSSYPSWYQQTPGQPPRMLIHNTDT |
| | RSSGVPDRESGSILGKKAALTITGAQADDESDYYCVVYLGNGFWVFGGGTKLTV |
| | LGGGGGGGGGEPRGPTIKPCPPCKCPAPNLLGGPSVFIFPPKIKDVLMISLSPI |
| | VTCVVVDVSEDDPDVQISWFVNNVEVHTAQTQTHREDYNSTLRVVSALPIQHQD |
| | WMSGKEFKCKVNNKDLPAPIERTISKPKGSVRAPQVYVLPPPEEEMTKKQVTLT |
| | CMVTDFMPEDIYVEWTNNGKTELNYKNTEPVLDSDGSYFMYSKLRVEKKNWVER |
| | NSYSCSVVHEGLHNHHTTKSFSRTPGK (SEQ ID NO: 374) |
| | Bold/underline = 3xG4S linker |
| | Underline = 9G linker |
| 43A11-HL-L3 | CTGCGCGCTCGCTCGCTCACTGAGGCCGCCCGGGCAAAGCCCGGGCGTCGGGCG |
| scFv-Fc | ACCTTTGGTCGCCCGGCCTCAGTGAGCGAGCGAGCGCGCAGAGAGGGAGTGGCC |
| [43A11 = control | AACTCCATCACTAGGGGTTCCTTGTAGTTAATGATTAACCCGCCATGCTACTTA |
| mAb)] | TCTACCAGGGTAATGGGGATCCTCTAGAACTATAGCTAGTCGACATTGATTATT |
| ITR-ITR: | GACTAGTTATTAATAGTAATCAATTACGGGGTCATTAGTTCATAGCCCATATAT |
| | GGAGTTCCGCGTTACATAACTTACGGTAAATGGCCCGCCTGGCTGACCGCCCAA |
| | CGACCCCCGCCCATTGACGTCAATAATGACGTATGTTCCCATAGTAACGCCAAT |
| | AGGGACTTTCCATTGACGTCAATGGGTGGAGTATTTACGGTAAACTGCCCACTT |
| | GGCAGTACATCAAGTGTATCATATGCCAAGTACGCCCCCTATTGACGTCAATGA |
| | CGGTAAATGGCCCGCCTGGCATTATGCCCAGTACATGACCTTATGGGACTTTCC |
| | TACTTGGCAGTACATCTACGTATTAGTCATCGCTATTACCATGGTCGAGGTGAG |
| | CCCCACGTTCTGCTTCACTCTCCCCATCTCCCCCCCCTCCCCACCCCCAATTTT |
| | GTATTTATTTATTTTTTAATTATTTTGTGCAGCGATGGGGGCGGGGGGGGGGGG |
| | GGGGCGCGCGCCAGGCGGGGCGGGGCGGGGCGAGGGGCGGGGCGGGGCGAGGCG |
| | GAGAGGTGCGGCGGCAGCCAATCAGAGCGGCGCGCTCCGAAAGTTTCCTTTTAT |
| | GGCGAGGCGGCGGCGGCGGCGGCCCTATAAAAAGCGAAGCGCGCGGCGGGCGGG |
| | AGTCGCTGCGCGCTGCCTTCGCCCCGTGCCCCGCTCCGCCGCCGCCTCGCGCCG |
| | CCCGCCCCGGCTCTGACTGACCGCGTTACTCCCACAGGTGAGCGGGCGGGACGG |
| | CCCTTCTCCTCCGGGCTGTAATTAGCGCTTGGTTTAATGACGGCTTGTTTCTTT |
| | TCTGTGGCTGCGTGAAAGCCTTGAGGGGCTCCGGGAGGGCCCTTTGTGCGGGGG |
| | GAGCGGCTCGGGGGGTGCGTGCGTGTGTGTGTGCGTGGGGAGCGCCGCGTGCGG |
| | CTCCGCGCTGCCCGGCGGCTGTGAGCGCTGCGGGCGCGGCGCGGGGCTTTGTGC |
| | GCTCCGCAGTGTGCGCGAGGGGAGCGCGGCCGGGGGCGGTGCCCCGCGGTGCGG |
| | GGGGGGCTGCGAGGGGAACAAAGGCTGCGTGCGGGGTGTGTGCGTGGGGGGGTG |
| | AGCAGGGGGTGTGGGCGCGTCGGTCGGGCTGCAACCCCCCCTGCACCCCCCTCC |
| | CCGAGTTGCTGAGCACGGCCCGGCTTCGGGTGCGGGGCTCCGTACGGGGCGTGG |
| | CGCGGGGCTCGCCGTGCCGGGCGGGGGGTGGCGGCAGGTGGGGGTGCCGGGCGG |
| | GGCGGGGCCGCCTCGGGCCGGGGAGGGCTCGGGGGAGGGGCGCGGCGGCCCCCG |
| | GAGCGCCGGCGGCTGTCGAGGCGCGGCGAGCCGCAGCCATTGCCTTTTATGGTA |
| | ATCGTGCGAGAGGGCGCAGGGACTTCCTTTGTCCCAAATCTGTGCGGAGCCGAA |
| | ATCTGGGAGGCGCCGCCGCACCCCCTCTAGCGGGCGCGGGGCGAAGCGGTGCGG |
| | CGCCGGCAGGAAGGAAATGGGCGGGGAGGGCCTTCGTGCGTCGCCGCGCCGCCG |
| | TCCCCTTCTCCCTCTCCAGCCTCGGGGCTGTCCGCGGGGGGACGGCTGCCTTCG |
| | GGGGGGACGGGGCAGGGCGGGGTTCGGCTTCTGGCGTGTGACCGGCGGCTCTAG |
| | AGCCTCTGCTAACCATGTTCATGCCTTCTTCTTTTTCCTACAGCTCCTGGGCAA |
| | CGTGCTGGTTATTGTGCTGTCTCATCATTTTGGCAAAGAATTCGCCACCATGTA |
| | CAGAATGCAGCTGCTGCTGCTCATTGCCCTGTCTCTGGCCCTGGTCACCAATTC |
| | TCAGGTCCAGCTGCAAGAGTCTGGCCCTGGACTGGTCAAGCCTTCTGGCACACT |
| | GAGCCTGACCTGTGCTGTGACTGGTGGCAGCATCAGCAGCAGCAATTGGTGGTC |
| | TTGGGTCAGACAGAGCCCTGGCAAAGGCCTGGAATGGATTGGAGAGATCCACCA |
| | TGATGGCAACCTGAACTACAACCCTCTGCTGAAGTCCAGAGTGTCCATGAGCCT |
| | GGACAGAAGCAAGAACCAGTTCAGCCTGAAGCTGACCTCTGTGACAGCTGCTGA |
| | CACTGCTGTGTACTACTGTGCCAGATGGGACTTCTTCTTTGACTCCTCCTACTA |
| | CATCAGGGGCTTTGACCTGTGGGGCCAGGGCACAATGGTTACAGTGTCCTCTGG |
| | TGGAGGCGGTTCAGGCGGAGGTGGCAGCGGCGGTGGAGGGTCGGAGACAACCCT |
| | GACACAGAGCCCTGGCACATTGTCTCTGAGCCCTGGGGAGAGAGTGACCCTGTC |
| | TTGTAGAGCCAGCCAGTCTGTGGACAGAAACTACCTGGCCTGGTATCAGCAGAA |
| | GCCTGGCCAGTCTCCTAGACTGCTGATCTACTCTGCCTCTAGGAGAGCCACAGG |
| | CATCCCTGACAGATTTTCTGGCAGTGGCTCTGGCACAGACTTCACCCTGACCAT |
| | CAGCAGACTGGAACCTGAGGACTTTGTGGTGTACTACTGCCAGCAGTATGGTGG |
| | CAGCCCTCCTATCACATTTGGCCAGGGCACAAGACTGGAAATCAAGGGCGGAGG |
| | AGGCGGAGGTGGAGGAGGAGAGCCTAGAGGCCCCACCATCAAGCCCTGTCCTCC |
| | ATGCAAGTGTCCTGCTCCTAACCTGCTTGGAGGCCCCTCTGTGTTCATCTTCCC |
| | ACCTAAGATCAAGGATGTGCTGATGATCTCTCTGAGCCCCATTGTGACCTGTGT |
| | GGTGGTGGATGTGTCTGAGGATGACCCTGATGTGCAGATCTCTTGGTTTGTGAA |
| | CAATGTGGAAGTGCACACAGCCCAGACACAGACCCACAGAGAGGACTACAACAG |
| | CACCCTGAGAGTGGTGTCTGCCCTGCCTATCCAGCACCAGGACTGGATGAGTGG |
| | CAAAGAGTTCAAGTGCAAAGTGAACAACAAGGACCTGCCTGCTCCAATTGAGAG |
| | AACCATCAGCAAGCCCAAGGGCTCTGTTAGAGCCCCTCAAGTGTATGTGCTGCC |
| | TCCACCTGAGGAAGAGATGACCAAGAAACAAGTGACCCTGACATGCATGGTCAC |
| | AGACTTCATGCCTGAGGACATCTATGTGGAATGGACCAACAATGGCAAGACAGA |
| | GCTGAACTACAAGAACACTGAGCCTGTGCTGGACTCTGATGGCAGCTACTTCAT |
| | GTACAGCAAGCTGAGGGTTGAGAAGAAGAACTGGGTTGAGAGAAACAGCTACAG |
| | CTGCTCTGTGGTGCATGAGGGCCTGCACAATCACCACACCACCAAGAGCTTCAG |
| | CAGAACCCCTGGCAAGTAATGACTCGAGGACGGGGTGAACTACGCCTGAGGATC |
| | CGATCTTTTTCCCTCTGCCAAAAATTATGGGGACATCATGAAGCCCCTTGAGCA |
| | TCTGACTTCTGGCTAATAAAGGAAATTTATTTTCATTGCAATAGTGTGTTGGAA |
| | TTTTTTGTGTCTCTCACTCGGAAGCAATTCGTTGATCTGAATTTCGACCACCCA |
| | TAATACCCATTACCCTGGTAGATAAGTAGCATGGCGGGTTAATCATTAACTACA |
| | AGGAACCCCTAGTGATGGAGTTGGCCACTCCCTCTCTGCGCGCTCGCTCGCTCA |
| | CTGAGGCCGGGCGACCAAAGGTCGCCCGACGCCCGGGCTTTGCCCGGGCGGCCT |
| | CAGTGAGCGAGCGAGCGCGCAG (SEQ ID NO: 375) |
| 43A11-ScFv-Fc | ATGTACAGAATGCAGCTGCTGCTGCTCATTGCCCTGTCTCTGGCCCTGGTCACC |
| polynucleotide | AATTCTCAGGTCCAGCTGCAAGAGTCTGGCCCTGGACTGGTCAAGCCTTCTGGC |
| (includes signal | ACACTGAGCCTGACCTGTGCTGTGACTGGTGGCAGCATCAGCAGCAGCAATTGG |
| peptide): | TGGTCTTGGGTCAGACAGAGCCCTGGCAAAGGCCTGGAATGGATTGGAGAGATC |
| (mIL2-43A11- | CACCATGATGGCAACCTGAACTACAACCCTCTGCTGAAGTCCAGAGTGTCCATG |
| VH3VL- | AGCCTGGACAGAAGCAAGAACCAGTTCAGCCTGAAGCTGACCTCTGTGACAGCT |
| 9GIgG2) | GCTGACACTGCTGTGTACTACTGTGCCAGATGGGACTTCTTCTTTGACTCCTCC |
| | TACTACATCAGGGGCTTTGACCTGTGGGGCCAGGGCACAATGGTTACAGTGTCC |
| | TCTGGTGGAGGCGGTTCAGGCGGAGGTGGCAGCGGCGGTGGAGGGTCGGAGACA |
| | ACCCTGACACAGAGCCCTGGCACATTGTCTCTGAGCCCTGGGGAGAGAGTGACC |
| | CTGTCTTGTAGAGCCAGCCAGTCTGTGGACAGAAACTACCTGGCCTGGTATCAG |
| | CAGAAGCCTGGCCAGTCTCCTAGACTGCTGATCTACTCTGCCTCTAGGAGAGCC |
| | ACAGGCATCCCTGACAGATTTTCTGGCAGTGGCTCTGGCACAGACTTCACCCTG |
| | ACCATCAGCAGACTGGAACCTGAGGACTTTGTGGTGTACTACTGCCAGCAGTAT |
| | GGTGGCAGCCCTCCTATCACATTTGGCCAGGGCACAAGACTGGAAATCAAGGGC |
| | GGAGGAGGCGGAGGTGGAGGAGGAGAGCCTAGAGGCCCCACCATCAAGCCCTGT |
| | CCTCCATGCAAGTGTCCTGCTCCTAACCTGCTTGGAGGCCCCTCTGTGTTCATC |
| | TTCCCACCTAAGATCAAGGATGTGCTGATGATCTCTCTGAGCCCCATTGTGACC |
| | TGTGTGGTGGTGGATGTGTCTGAGGATGACCCTGATGTGCAGATCTCTTGGTTT |
| | GTGAACAATGTGGAAGTGCACACAGCCCAGACACAGACCCACAGAGAGGACTAC |
| | AACAGCACCCTGAGAGTGGTGTCTGCCCTGCCTATCCAGCACCAGGACTGGATG |
| | AGTGGCAAAGAGTTCAAGTGCAAAGTGAACAACAAGGACCTGCCTGCTCCAATT |
| | GAGAGAACCATCAGCAAGCCCAAGGGCTCTGTTAGAGCCCCTCAAGTGTATGTG |
| | CTGCCTCCACCTGAGGAAGAGATGACCAAGAAACAAGTGACCCTGACATGCATG |
| | GTCACAGACTTCATGCCTGAGGACATCTATGTGGAATGGACCAACAATGGCAAG |
| | ACAGAGCTGAACTACAAGAACACTGAGCCTGTGCTGGACTCTGATGGCAGCTAC |
| | TTCATGTACAGCAAGCTGAGGGTTGAGAAGAAGAACTGGGTTGAGAGAAACAGC |
| | TACAGCTGCTCTGTGGTGCATGAGGGCCTGCACAATCACCACACCACCAAGAGC |
| | TTCAGCAGAACCCCTGGCAAG (SEQ ID NO: 376) |
| Full 43A11 | MYRMQLLLLIALSLALVTNSQVQLQESGPGLVKPSGTLSLTCAVTGGSISSSNW |
| ScFv-Fc | WSWVRQSPGKGLEWIGEIHHDGNLNYNPLLKSRVSMSLDRSKNQFSLKLTSVTA |
| polypeptide | ADTAVYYCARWDFFFDSSYYIRGFDLWGQGTMVTVSSGGGGSGGGGSGGGGSET |
| (includes signal | TLTQSPGTLSLSPGERVTLSCRASQSVDRNYLAWYQQKPGQSPRLLIYSASRRA |
| peptide) | TGIPDRFSGSGSGTDFTLTISRLEPEDFVVYYCQQYGGSPPITFGQGTRLEIKG |
| | GGGGGGGGEPRGPTIKPCPPCKCPAPNLLGGPSVFIFPPKIKDVLMISLSPIVT |
| | CVVVDVSEDDPDVQISWFVNNVEVHTAQTQTHREDYNSTLRVVSALPIQHQDWM |
| | SGKEFKCKVNNKDLPAPIERTISKPKGSVRAPQVYVLPPPEEEMTKKQVTLTCM |
| | VTDFMPEDIYVEWTNNGKTELNYKNTEPVLDSDGSYFMYSKLRVEKKNWVERNS |
| | YSCSVVHEGLHNHHTTKSFSRTPGK (SEQ ID NO: 377) |
| | Bold/underline = 3xG4S linker |
| | Underline = 9G linker |

[0385] ScFv-Fc mAbs are expressed as single-chain polypeptides which dimerize to provide antibodies capable of bivalent binding to antigen, similarly to full-length quadroma antibodies.

[0386] Table 11G shows examples of anti-Tau Fab constructs. Each construct utilizes the Furin (GSG) T2A linker system: RKRR GSG EGRGSLLTCGDVEENPGP between the heavy and light chains. The hinge region at the 3′ end of Fab Heavy Chain (following C_{H}1) is: EPKSCDKTH. Included in Table 11G are expression constructs that include the nucleotide sequence encoding the heavy and light chain liked by a Furin(GSG) T2A linker, regulatory elements, including a CAG promoter and polyadenylation signal sequence, flanked by ITR sequences, the sequence encoding the Fab fragment, and the amino acid sequence of the encoded polypeptide (the heavy and light chain linked via the linker).

TABLE 11G
Anti-Tau Fab Fragment Constructs

| Construct | Sequence |
|---|---|
| pAAV.CAG.hu. | CTGCGCGCTCGCTCGCTCACTGAGGCCGCCCGGGCAAAGCCCGGGCGTCGGGCG |
| Tau.4p3-Fab | ACCTTTGGTCGCCCGGCCTCAGTGAGCGAGCGAGCGCGCAGAGAGGGAGTGGCC |
| (ITR to ITR) | AACTCCATCACTAGGGGTTCCTTGTAGTTAATGATTAACCCGCCATGCTACTTA |
| | TCTACCAGGGTAATGGGGATCCTCTAGAACTATAGCTAGTCGACATTGATTATT |
| | GACTAGTTATTAATAGTAATCAATTACGGGGTCATTAGTTCATAGCCCATATAT |
| | GGAGTTCCGCGTTACATAACTTACGGTAAATGGCCCGCCTGGCTGACCGCCCAA |
| | CGACCCCCGCCCATTGACGTCAATAATGACGTATGTTCCCATAGTAACGCCAAT |
| | AGGGACTTTCCATTGACGTCAATGGGTGGAGTATTTACGGTAAACTGCCCACTT |
| | GGCAGTACATCAAGTGTATCATATGCCAAGTACGCCCCCTATTGACGTCAATGA |
| | CGGTAAATGGCCCGCCTGGCATTATGCCCAGTACATGACCTTATGGGACTTTCC |
| | TACTTGGCAGTACATCTACGTATTAGTCATCGCTATTACCATGGTCGAGGTGAG |
| | CCCCACGTTCTGCTTCACTCTCCCCATCTCCCCCCCCTCCCCACCCCCAATTTT |
| | GTATTTATTTATTTTTTAATTATTTTGTGCAGCGATGGGGGCGGGGGGGGGGGG |
| | GGGGCGCGCGCCAGGCGGGGCGGGGCGGGGCGAGGGGGGGGGCGGGGCGAGGCG |
| | GAGAGGTGCGGCGGCAGCCAATCAGAGCGGCGCGCTCCGAAAGTTTCCTTTTAT |
| | GGCGAGGCGGCGGCGGCGGCGGCCCTATAAAAAGCGAAGCGCGCGGCGGGCGGG |
| | AGTCGCTGCGCGCTGCCTTCGCCCCGTGCCCCGCTCCGCCGCCGCCTCGCGCCG |
| | CCCGCCCCGGCTCTGACTGACCGCGTTACTCCCACAGGTGAGCGGGCGGGACGG |
| | CCCTTCTCCTCCGGGCTGTAATTAGCGCTTGGTTTAATGACGGCTTGTTTCTTT |
| | TCTGTGGCTGCGTGAAAGCCTTGAGGGGCTCCGGGAGGGCCCTTTGTGCGGGGG |
| | GAGCGGCTCGGGGGGTGCGTGCGTGTGTGTGTGCGTGGGGAGCGCCGCGTGCGG |
| | CTCCGCGCTGCCCGGCGGCTGTGAGCGCTGCGGGCGCGGCGCGGGGCTTTGTGC |
| | GCTCCGCAGTGTGCGCGAGGGGAGCGCGGCCGGGGGCGGTGCCCCGCGGTGCGG |
| | GGGGGGCTGCGAGGGGAACAAAGGCTGCGTGCGGGGTGTGTGCGTGGGGGGGTG |
| | AGCAGGGGGTGTGGGCGCGTCGGTCGGGCTGCAACCCCCCCTGCACCCCCCTCC |
| | CCGAGTTGCTGAGCACGGCCCGGCTTCGGGTGCGGGGCTCCGTACGGGGCGTGG |
| | CGCGGGGCTCGCCGTGCCGGGCGGGGGGTGGCGGCAGGTGGGGGTGCCGGGCGG |
| | GGCGGGGCCGCCTCGGGCCGGGGAGGGCTCGGGGGAGGGGCGCGGCGGCCCCCG |
| | GAGCGCCGGCGGCTGTCGAGGCGCGGCGAGCCGCAGCCATTGCCTTTTATGGTA |
| | ATCGTGCGAGAGGGCGCAGGGACTTCCTTTGTCCCAAATCTGTGCGGAGCCGAA |
| | ATCTGGGAGGCGCCGCCGCACCCCCTCTAGCGGGCGCGGGGCGAAGCGGTGCGG |
| | CGCCGGCAGGAAGGAAATGGGCGGGGAGGGCCTTCGTGCGTCGCCGCGCCGCCG |
| | TCCCCTTCTCCCTCTCCAGCCTCGGGGCTGTCCGCGGGGGGACGGCTGCCTTCG |
| | GGGGGGACGGGGCAGGGCGGGGTTCGGCTTCTGGCGTGTGACCGGCGGCTCTAG |
| | AGCCTCTGCTAACCATGTTCATGCCTTCTTCTTTTTCCTACAGCTCCTGGGCAA |
| | CGTGCTGGTTATTGTGCTGTCTCATCATTTTGGCAAAGAATTCGCCACCATGTA |
| | CAGAATGCAGCTGCTGCTGCTCATTGCCCTGTCTCTGGCCCTGGTCACCAATTC |
| | TGAAGTGCAGCTGGTGCAGTCTGGGGCTGAAGTGAAGAAGCCTGGGGAGAGCCT |
| | GAAGATCAGCTGCAAAGTGTCTGGCTATGACTTCAGCAAGTACTGGATTGGCTG |
| | GGTCAGACAGATGCCTGGCAAAGGCCTGGAATGGATGGGCCTGATCTACCCTGG |
| | GGACTCTGACACCAGATACAGCCCTAGCCTGGAAGGCCAGGTGTCCATCTCTGC |
| | TGACAAGAGCATCTCTGCAGCCTACCTGCAGTTCAGCAGCCTGAAGGCCTCTGA |
| | CTCTGCCATGTACTACTGTGTCAGAAAGGGCTACTCTGCCTACCTTGGAGGATG |
| | GTTTGATCCTTGGGGCCAGGGCACACTGGTTACAGTGTCCTCTGCCAGCACAAA |
| | GGGCCCCTCTGTTTTTCCACTGGCTCCCAGCAGCAAGTCCACCAGTGGTGGTAC |
| | AGCTGCCCTGGGCTGTCTGGTCAAGGATTACTTCCCTGAGCCTGTGACTGTGTC |
| | CTGGAACTCTGGTGCTCTGACCTCTGGGGTGCACACCTTTCCAGCTGTGCTGCA |
| | GTCCTCTGGCCTGTACTCTCTGTCCTCTGTGGTCACAGTGCCTAGCTCTAGCCT |
| | GGGCACCCAGACCTACATCTGCAATGTGAACCACAAGCCTAGCAACACCAAGGT |
| | GGACAAGAGAGTGGAACCCAAGAGCTGTGACAAGACCCACAGAAAGAGAAGAGG |
| | CTCTGGAGAAGGCAGAGGCTCCCTGCTGACATGTGGGGATGTTGAAGAGAATCC |
| | TGGGCCTATGTATAGGATGCAACTGCTCCTCCTGATTGCTCTGAGCCTGGCTCT |
| | TGTGACCAACTCTGATATCCAGCTGACACAGAGCCCTGACAGCCTGGCTGCTTC |
| | TCTGGGAGAGAGAGTGACCATCAACTGCAGAAGCTCCCAGAACATCTTCTACAA |
| | CTCCAACAACAAGAACTTCCTGGCCTGGTATCAGCAAAAGGCTGGACAGAGCCC |
| | CAAGCTGCTGATCTACTGGGCCTCTACCAGAGAGTCTGGGGTCCCAGACAGATT |
| | CTCTGGCTCTGGATCTGGCACAGACTTCACCCTGACCATCAGTGGACTGCAGGC |
| | TGGGGATGTTGCTGTGTACTTCTGCCAGCAGTACTTCACAGATGCCCCTACCTT |
| | TGGTGGTGGCACAAAGGTGGAAATCAAGAGAACAGTGGCTGCCCCATCTGTGTT |
| | CATCTTCCCACCATCTGATGAACAGCTGAAGTCTGGCACTGCCTCTGTTGTGTG |
| | CCTGCTGAACAACTTCTACCCTAGAGAAGCCAAGGTGCAGTGGAAAGTGGATAA |
| | TGCCCTCCAGTCTGGCAATAGCCAAGAGTCAGTGACAGAGCAGGACTCCAAGGA |
| | TTCCACCTACAGCCTGAGCAGCACCCTGACACTGAGCAAGGCTGACTATGAGAA |
| | GCACAAAGTGTATGCCTGTGAAGTGACACACCAGGGACTGAGCAGCCCAGTGAC |
| | CAAGAGCTTCAACAGGGGAGAGTGCTGATAACTCGAGGACGGGGTGAACTACGC |
| | CTGAGGATCCGATCTTTTTCCCTCTGCCAAAAATTATGGGGACATCATGAAGCC |
| | CCTTGAGCATCTGACTTCTGGCTAATAAAGGAAATTTATTTTCATTGCAATAGT |
| | GTGTTGGAATTTTTTGTGTCTCTCACTCGGAAGCAATTCGTTGATCTGAATTTC |
| | GACCACCCATAATACCCATTACCCTGGTAGATAAGTAGCATGGCGGGTTAATCA |
| | TTAACTACAAGGAACCCCTAGTGATGGAGTTGGCCACTCCCTCTCTGCGCGCTC |
| | GCTCGCTCACTGAGGCCGGGCGACCAAAGGTCGCCCGACGCCCGGGCTTTGCCC |
| | GGGCGGCCTCAGTGAGCGAGCGAGCGCGCAG (SEQ ID NO: 378) |
| 4p3 Fab | ATGTACAGAATGCAGCTGCTGCTGCTCATTGCCCTGTCTCTGGCCCTGGTCACC |
| polynucleotide | AATTCTGAAGTGCAGCTGGTGCAGTCTGGGGCTGAAGTGAAGAAGCCTGGGGAG |
| (mIL2- | AGCCTGAAGATCAGCTGCAAAGTGTCTGGCTATGACTTCAGCAAGTACTGGATT |
| 4p3_HC_Fab- | GGCTGGGTCAGACAGATGCCTGGCAAAGGCCTGGAATGGATGGGCCTGATCTAC |
| FurinT2A-mIL2- | CCTGGGGACTCTGACACCAGATACAGCCCTAGCCTGGAAGGCCAGGTGTCCATC |
| 4p3_LC) | TCTGCTGACAAGAGCATCTCTGCAGCCTACCTGCAGTTCAGCAGCCTGAAGGCC |
| | TCTGACTCTGCCATGTACTACTGTGTCAGAAAGGGCTACTCTGCCTACCTTGGA |
| | GGATGGTTTGATCCTTGGGGCCAGGGCACACTGGTTACAGTGTCCTCTGCCAGC |
| | ACAAAGGGCCCCTCTGTTTTTCCACTGGCTCCCAGCAGCAAGTCCACCAGTGGT |
| | GGTACAGCTGCCCTGGGCTGTCTGGTCAAGGATTACTTCCCTGAGCCTGTGACT |
| | GTGTCCTGGAACTCTGGTGCTCTGACCTCTGGGGTGCACACCTTTCCAGCTGTG |
| | CTGCAGTCCTCTGGCCTGTACTCTCTGTCCTCTGTGGTCACAGTGCCTAGCTCT |
| | AGCCTGGGCACCCAGACCTACATCTGCAATGTGAACCACAAGCCTAGCAACACC |
| | AAGGTGGACAAGAGAGTGGAACCCAAGAGCTGTGACAAGACCCACAGAAAGAGA |
| | AGAGGCTCTGGAGAAGGCAGAGGCTCCCTGCTGACATGTGGGGATGTTGAAGAG |
| | AATCCTGGGCCTATGTATAGGATGCAACTGCTCCTCCTGATTGCTCTGAGCCTG |
| | GCTCTTGTGACCAACTCTGATATCCAGCTGACACAGAGCCCTGACAGCCTGGCT |
| | GCTTCTCTGGGAGAGAGAGTGACCATCAACTGCAGAAGCTCCCAGAACATCTTC |
| | TACAACTCCAACAACAAGAACTTCCTGGCCTGGTATCAGCAAAAGGCTGGACAG |
| | AGCCCCAAGCTGCTGATCTACTGGGCCTCTACCAGAGAGTCTGGGGTCCCAGAC |
| | AGATTCTCTGGCTCTGGATCTGGCACAGACTTCACCCTGACCATCAGTGGACTG |
| | CAGGCTGGGGATGTTGCTGTGTACTTCTGCCAGCAGTACTTCACAGATGCCCCT |
| | ACCTTTGGTGGTGGCACAAAGGTGGAAATCAAGAGAACAGTGGCTGCCCCATCT |
| | GTGTTCATCTTCCCACCATCTGATGAACAGCTGAAGTCTGGCACTGCCTCTGTT |
| | GTGTGCCTGCTGAACAACTTCTACCCTAGAGAAGCCAAGGTGCAGTGGAAAGTG |
| | GATAATGCCCTCCAGTCTGGCAATAGCCAAGAGTCAGTGACAGAGCAGGACTCC |
| | AAGGATTCCACCTACAGCCTGAGCAGCACCCTGACACTGAGCAAGGCTGACTAT |
| | GAGAAGCACAAAGTGTATGCCTGTGAAGTGACACACCAGGGACTGAGCAGCCCA |
| | GTGACCAAGAGCTTCAACAGGGGAGAGTGCTGA (SEQ ID NO: 379) |
| 4p3 Fab | HC (with signal peptide): |
| polypeptides | MYRMQLLLLIALSLALVTNSEVQLVQSGAEVKKPGESLKISCKVSGYDESKYWI |
| | GWVRQMPGKGLEWMGLIYPGDSDTRYSPSLEGQVSISADKSISAAYLQFSSLKA |
| | SDSAMYYCVRKGYSAYLGGWFDPWGQGTLVTVSSASTKGPSVFPLAPSSKSTSG |
| | GTAALGCLVKDYFPEPVTVSWNSGALTSGVHTFPAVLQSSGLYSLSSVVTVPSS |
| | SLGTQTYICNVNHKPSNTKVDKRVEPKSCDKTH (SEQ ID NO: 380) |
| | HC (no signal): |
| | EVQLVQSGAEVKKPGESLKISCKVSGYDFSKYWIGWVRQMPGKGLEWMGLIYPG |
| | DSDTRYSPSLEGQVSISADKSISAAYLQFSSLKASDSAMYYCVRKGYSAYLGGW |
| | FDPWGQGTLVTVSSASTKGPSVFPLAPSSKSTSGGTAALGCLVKDYFPEPVTVS |
| | WNSGALTSGVHTFPAVLQSSGLYSLSSVVTVPSSSLGTQTYICNVNHKPSNTKV |
| | DKRVEPKSCDKTH (SEQ ID NO: 381) |
| | LC (kappa) (with signal peptide): |
| | MYRMQLLLLIALSLALVINSDIQLTQSPDSLAASLGERVTINCRSSQNIFYNSN |
| | NKNFLAWYQQKAGQSPKLLIYWASTRESGVPDRFSGSGSGTDFTLTISGLQAGD |
| | VAVYFCQQYFTDAPTFGGGTKVEIKRTVAAPSVFIFPPSDEQLKSGTASVVCLL |
| | NNFYPREAKVQWKVDNALQSGNSQESVTEQDSKDSTYSLSSTLTLSKADYEKHK |
| | VYACEVTHQGLSSPVTKSENRGEC (SEQ ID NO: 382) |
| | LC (kappa)(no signal) |
| | DIQLTQSPDSLAASLGERVTINCRSSQNIFYNSNNKNFLAWYQQKAGQSPKLLI |
| | YWASTRESGVPDRFSGSGSGTDFTLTISGLQAGDVAVYFCQQYFTDAPTFGGGT |
| | KVEIKRTVAAPSVFIFPPSDEQLKSGTASVVCLLNNFYPREAKVQWKVDNALQS |
| | GNSQESVTEQDSKDSTYSLSSTLTLSKADYEKHKVYACEVTHQGLSSPVTKSFN |
| | RGEC (SEQ ID NO: 383) |
| pAAV.CAG.hu. | CTGCGCGCTCGCTCGCTCACTGAGGCCGCCCGGGCAAAGCCCGGGCGTCGGGCG |
| Tau8H1-Fab | ACCTTTGGTCGCCCGGCCTCAGTGAGCGAGCGAGCGCGCAGAGAGGGAGTGGCC |
| (ITR to ITR) | AACTCCATCACTAGGGGTTCCTTGTAGTTAATGATTAACCCGCCATGCTACTTA |
| | TCTACCAGGGTAATGGGGATCCTCTAGAACTATAGCTAGTCGACATTGATTATT |
| | GACTAGTTATTAATAGTAATCAATTACGGGGTCATTAGTTCATAGCCCATATAT |
| | GGAGTTCCGCGTTACATAACTTACGGTAAATGGCCCGCCTGGCTGACCGCCCAA |
| | CGACCCCCGCCCATTGACGTCAATAATGACGTATGTTCCCATAGTAACGCCAAT |
| | AGGGACTTTCCATTGACGTCAATGGGTGGAGTATTTACGGTAAACTGCCCACTT |
| | GGCAGTACATCAAGTGTATCATATGCCAAGTACGCCCCCTATTGACGTCAATGA |
| | CGGTAAATGGCCCGCCTGGCATTATGCCCAGTACATGACCTTATGGGACTTTCC |
| | TACTTGGCAGTACATCTACGTATTAGTCATCGCTATTACCATGGTCGAGGTGAG |
| | CCCCACGTTCTGCTTCACTCTCCCCATCTCCCCCCCCTCCCCACCCCCAATTTT |
| | GTATTTATTTATTTTTTAATTATTTTGTGCAGCGATGGGGGCGGGGGGGGGGGG |
| | GGGGCGCGCGCCAGGCGGGGCGGGGCGGGGCGAGGGGCGGGGCGGGGCGAGGCG |
| | GAGAGGTGCGGCGGCAGCCAATCAGAGCGGCGCGCTCCGAAAGTTTCCTTTTAT |
| | GGCGAGGCGGCGGCGGCGGCGGCCCTATAAAAAGCGAAGCGCGCGGCGGGCGGG |
| | AGTCGCTGCGCGCTGCCTTCGCCCCGTGCCCCGCTCCGCCGCCGCCTCGCGCCG |
| | CCCGCCCCGGCTCTGACTGACCGCGTTACTCCCACAGGTGAGCGGGCGGGACGG |
| | CCCTTCTCCTCCGGGCTGTAATTAGCGCTTGGTTTAATGACGGCTTGTTTCTTT |
| | TCTGTGGCTGCGTGAAAGCCTTGAGGGGCTCCGGGAGGGCCCTTTGTGCGGGGG |
| | GAGCGGCTCGGGGGGTGCGTGCGTGTGTGTGTGCGTGGGGAGCGCCGCGTGCGG |
| | CTCCGCGCTGCCCGGCGGCTGTGAGCGCTGCGGGCGCGGCGCGGGGCTTTGTGC |
| | GCTCCGCAGTGTGCGCGAGGGGAGCGCGGCCGGGGGCGGTGCCCCGCGGTGCGG |
| | GGGGGGCTGCGAGGGGAACAAAGGCTGCGTGCGGGGTGTGTGCGTGGGGGGGTG |
| | AGCAGGGGGTGTGGGCGCGTCGGTCGGGCTGCAACCCCCCCTGCACCCCCCTCC |
| | CCGAGTTGCTGAGCACGGCCCGGCTTCGGGTGCGGGGCTCCGTACGGGGCGTGG |
| | CGCGGGGCTCGCCGTGCCGGGCGGGGGGTGGCGGCAGGTGGGGGTGCCGGGCGG |
| | GGCGGGGCCGCCTCGGGCCGGGGAGGGCTCGGGGGAGGGGCGCGGCGGCCCCCG |
| | GAGCGCCGGCGGCTGTCGAGGCGCGGCGAGCCGCAGCCATTGCCTTTTATGGTA |
| | ATCGTGCGAGAGGGCGCAGGGACTTCCTTTGTCCCAAATCTGTGCGGAGCCGAA |
| | ATCTGGGAGGCGCCGCCGCACCCCCTCTAGCGGGCGCGGGGCGAAGCGGTGCGG |
| | CGCCGGCAGGAAGGAAATGGGGGGGGAGGGCCTTCGTGCGTCGCCGCGCCGCCG |
| | TCCCCTTCTCCCTCTCCAGCCTCGGGGCTGTCCGCGGGGGGACGGCTGCCTTCG |
| | GGGGGGACGGGGCAGGGCGGGGTTCGGCTTCTGGCGTGTGACCGGCGGCTCTAG |
| | AGCCTCTGCTAACCATGTTCATGCCTTCTTCTTTTTCCTACAGCTCCTGGGCAA |
| | CGTGCTGGTTATTGTGCTGTCTCATCATTTTGGCAAAGAATTCGCCACCATGTA |
| | CAGAATGCAGCTGCTGCTGCTCATTGCCCTGTCTCTGGCCCTGGTCACCAATTC |
| | TGAAGTGCAGCTGGTGGAAAGTGGTGGTGGACTGGTTCAGCCTGGTGGCAGCCT |
| | GAGACTGTCTTGTGCTGCCTCTGGCTTCACCTTCAGCATCTACACCATGAGCTG |
| | GGTCAGACAGGCCCCTGGCAAAGGACTGGAATGGGTGTCAGCCATCCTGTCTGA |
| | TGGCAGCACCTACTATGCTGACTCTGTGGAAGGCAGATTCACCATCAGCAGAGA |
| | CAACAGCAAGACCACACTGTACCTGCAGATGAACAGCCTGACAGCTGAGGACAC |
| | AGCAGTGTACTACTGCACCAAGAGAGTGGAAGGCTCCTTCAGAGGCTGGGGCCA |
| | GGGAACACTGGTTACAGTGTCCTCTGCCAGCACAAAGGGCCCCTCTGTTTTTCC |
| | ACTGGCTCCCAGCAGCAAGAGCACCAGTGGTGGAACAGCTGCCCTGGGCTGTCT |
| | GGTCAAGGATTACTTCCCTGAGCCTGTGACTGTGTCCTGGAACTCTGGTGCACT |
| | GACCTCTGGGGTGCACACCTTTCCAGCTGTGCTGCAGTCCTCTGGCCTGTACTC |
| | TCTGTCCTCTGTGGTCACAGTGCCTAGCTCTAGCCTGGGCACCCAGACCTACAT |
| | CTGCAATGTGAACCACAAGCCTAGCAACACCAAGGTGGACAAAAGAGTGGAACC |
| | CAAGAGCTGTGACAAGACCCACAGAAAGAGAAGAGGCTCTGGAGAAGGCAGAGG |
| | CTCCCTGCTGACATGTGGGGATGTTGAAGAGAATCCTGGGCCTATGTATAGGAT |
| | GCAACTGCTCCTCCTGATTGCTCTGAGCCTGGCTCTTGTGACCAACTCTGAGAT |
| | TGTGATGACACAGAGCCCAGGCACACTGTCACTGTCTCCAGGGGAATCTGCCAC |
| | TCTGAGCTGTAGAGCCAGCCAGTCTGTGTCTACCACCTACCTGGCCTGGTATCA |
| | GCAAAAGCCTGGACAGGCTCCCAGACTGCTGATCTATGGGGCCTCTTCTAGAGC |
| | CACAGGCATCCCTGACAGATTTTCTGGCAGTGGCTCTGGCACAGACTTCACCCT |
| | GACCATCTCTAGACTGGAACCTGAGGACTTTGCTGTCTACTACTGCCAGCAGTA |
| | TGGTGGCTCCAGACTGATCACCTTTGGCCAGGGCACCAGACTGGAAATCAAGAG |
| | AACAGTGGCTGCCCCATCTGTGTTCATCTTCCCACCATCTGATGAGCAGCTCAA |
| | GTCTGGCACTGCCTCTGTTGTGTGCCTGCTGAACAACTTCTACCCTAGAGAAGC |
| | CAAGGTGCAGTGGAAGGTTGACAATGCCCTGCAGTCTGGCAATAGCCAAGAATC |
| | TGTGACAGAGCAGGACTCCAAGGATAGCACCTACAGCCTGTCTAGCACCCTGAC |
| | ACTGAGCAAGGCTGACTATGAGAAGCACAAAGTGTATGCCTGTGAAGTGACACA |
| | CCAGGGCCTGAGCAGCCCAGTGACCAAGAGCTTCAATAGAGGGGAGTGCTGATA |
| | ACTCGAGGACGGGGTGAACTACGCCTGAGGATCCGATCTTTTTCCCTCTGCCAA |
| | AAATTATGGGGACATCATGAAGCCCCTTGAGCATCTGACTTCTGGCTAATAAAG |
| | GAAATTTATTTTCATTGCAATAGTGTGTTGGAATTTTTTGTGTCTCTCACTCGG |
| | AAGCAATTCGTTGATCTGAATTTCGACCACCCATAATACCCATTACCCTGGTAG |
| | ATAAGTAGCATGGCGGGTTAATCATTAACTACAAGGAACCCCTAGTGATGGAGT |
| | TGGCCACTCCCTCTCTGCGCGCTCGCTCGCTCACTGAGGCCGGGCGACCAAAGG |
| | TCGCCCGACGCCCGGGCTTTGCCCGGGCGGCCTCAGTGAGCGAGCGAGCGCGCA |
| | G (SEQ ID NO: 384) |
| 8H1 Fab | ATGTACAGAATGCAGCTGCTGCTGCTCATTGCCCTGTCTCTGGCCCTGGTCACC |
| nucleotide: | AATTCTGAAGTGCAGCTGGTGGAAAGTGGTGGTGGACTGGTTCAGCCTGGTGGC |
| (mIL2- | AGCCTGAGACTGTCTTGTGCTGCCTCTGGCTTCACCTTCAGCATCTACACCATG |
| 8H1_HC_Fab- | AGCTGGGTCAGACAGGCCCCTGGCAAAGGACTGGAATGGGTGTCAGCCATCCTG |
| FurinT2A-mIL2- | TCTGATGGCAGCACCTACTATGCTGACTCTGTGGAAGGCAGATTCACCATCAGC |
| 8H1_LC) | AGAGACAACAGCAAGACCACACTGTACCTGCAGATGAACAGCCTGACAGCTGAG |
| | GACACAGCAGTGTACTACTGCACCAAGAGAGTGGAAGGCTCCTTCAGAGGCTGG |
| | GGCCAGGGAACACTGGTTACAGTGTCCTCTGCCAGCACAAAGGGCCCCTCTGTT |
| | TTTCCACTGGCTCCCAGCAGCAAGAGCACCAGTGGTGGAACAGCTGCCCTGGGC |
| | TGTCTGGTCAAGGATTACTTCCCTGAGCCTGTGACTGTGTCCTGGAACTCTGGT |
| | GCACTGACCTCTGGGGTGCACACCTTTCCAGCTGTGCTGCAGTCCTCTGGCCTG |
| | TACTCTCTGTCCTCTGTGGTCACAGTGCCTAGCTCTAGCCTGGGCACCCAGACC |
| | TACATCTGCAATGTGAACCACAAGCCTAGCAACACCAAGGTGGACAAAAGAGTG |
| | GAACCCAAGAGCTGTGACAAGACCCACAGAAAGAGAAGAGGCTCTGGAGAAGGC |
| | AGAGGCTCCCTGCTGACATGTGGGGATGTTGAAGAGAATCCTGGGCCTATGTAT |
| | AGGATGCAACTGCTCCTCCTGATTGCTCTGAGCCTGGCTCTTGTGACCAACTCT |
| | GAGATTGTGATGACACAGAGCCCAGGCACACTGTCACTGTCTCCAGGGGAATCT |
| | GCCACTCTGAGCTGTAGAGCCAGCCAGTCTGTGTCTACCACCTACCTGGCCTGG |
| | TATCAGCAAAAGCCTGGACAGGCTCCCAGACTGCTGATCTATGGGGCCTCTTCT |
| | AGAGCCACAGGCATCCCTGACAGATTTTCTGGCAGTGGCTCTGGCACAGACTTC |
| | ACCCTGACCATCTCTAGACTGGAACCTGAGGACTTTGCTGTCTACTACTGCCAG |
| | CAGTATGGTGGCTCCAGACTGATCACCTTTGGCCAGGGCACCAGACTGGAAATC |
| | AAGAGAACAGTGGCTGCCCCATCTGTGTTCATCTTCCCACCATCTGATGAGCAG |
| | CTCAAGTCTGGCACTGCCTCTGTTGTGTGCCTGCTGAACAACTTCTACCCTAGA |
| | GAAGCCAAGGTGCAGTGGAAGGTTGACAATGCCCTGCAGTCTGGCAATAGCCAA |
| | GAATCTGTGACAGAGCAGGACTCCAAGGATAGCACCTACAGCCTGTCTAGCACC |
| | CTGACACTGAGCAAGGCTGACTATGAGAAGCACAAAGTGTATGCCTGTGAAGTG |
| | ACACACCAGGGCCTGAGCAGCCCAGTGACCAAGAGCTTCAATAGAGGGGAGTGC |
| | (SEQ ID NO: 385) |
| 8H1 Fab | HC (with signal peptide): |
| polypeptides | MYRMQLLLLIALSLALVTNSEVQLVESGGGLVQPGGSLRLSCAASGFTFSIYTM |
| | SWVRQAPGKGLEWVSAILSDGSTYYADSVEGRFTISRDNSKTTLYLQMNSLTAE |
| | DTAVYYCTKRVEGSFRGWGQGTLVTVSSASTKGPSVFPLAPSSKSTSGGTAALG |
| | CLVKDYFPEPVTVSWNSGALTSGVHTFPAVLQSSGLYSLSSVVTVPSSSLGTQT |
| | YICNVNHKPSNTKVDKRVEPKSCDKTH (SEQ ID NO: 386) |
| | HC (no signal): |
| | EVQLVESGGGLVQPGGSLRLSCAASGFTFSIYTMSWVRQAPGKGLEWVSAILSD |
| | GSTYYADSVEGRFTISRDNSKTTLYLQMNSLTAEDTAVYYCTKRVEGSFRGWGQ |
| | GTLVTVSSASTKGPSVFPLAPSSKSTSGGTAALGCLVKDYFPEPVTVSWNSGAL |
| | TSGVHTFPAVLQSSGLYSLSSVVTVPSSSLGTQTYICNVNHKPSNTKVDKRVEP |
| | KSCDKTH (SEQ ID NO: 387) |
| | LC (kappa) (with signal peptide): |
| | MYRMQLLLLIALSLALVTNSEIVMTQSPGTLSLSPGESATLSCRASQSVSTTYL |
| | AWYQQKPGQAPRLLIYGASSRATGIPDRFSGSGSGTDFTLTISRLEPEDFAVYY |
| | CQQYGGSRLITFGQGTRLEIKRTVAAPSVFIFPPSDEQLKSGTASVVCLLNNFY |
| | PREAKVQWKVDNALQSGNSQESVTEQDSKDSTYSLSSTLTLSKADYEKHKVYAC |
| | EVTHQGLSSPVTKSFNRGEC (SEQ ID NO: 388) |
| | LC (kappa) (no signal) |
| | EIVMTQSPGTLSLSPGESATLSCRASQSVSTTYLAWYQQKPGQAPRLLIYGASS |
| | RATGIPDRFSGSGSGTDFTLTISRLEPEDFAVYYCQQYGGSRLITFGQGTRLEI |
| | KRTVAAPSVFIFPPSDEQLKSGTASVVCLLNNFYPREAKVQWKVDNALQSGNSQ |
| | ESVTEQDSKDSTYSLSSTLTLSKADYEKHKVYACEVTHQGLSSPVTKSFNRGEC |
| | (SEQ ID NO: 389) |
| pAAV.CAG.hu. | CTGCGCGCTCGCTCGCTCACTGAGGCCGCCCGGGCAAAGCCCGGGCGTCGGGCG |
| Tau.31B6-Fab | ACCTTTGGTCGCCCGGCCTCAGTGAGCGAGCGAGCGCGCAGAGAGGGAGTGGCC |
| (ITR to ITR) | AACTCCATCACTAGGGGTTCCTTGTAGTTAATGATTAACCCGCCATGCTACTTA |
| | TCTACCAGGGTAATGGGGATCCTCTAGAACTATAGCTAGTCGACATTGATTATT |
| | GACTAGTTATTAATAGTAATCAATTACGGGGTCATTAGTTCATAGCCCATATAT |
| | GGAGTTCCGCGTTACATAACTTACGGTAAATGGCCCGCCTGGCTGACCGCCCAA |
| | CGACCCCCGCCCATTGACGTCAATAATGACGTATGTTCCCATAGTAACGCCAAT |
| | AGGGACTTTCCATTGACGTCAATGGGTGGAGTATTTACGGTAAACTGCCCACTT |
| | GGCAGTACATCAAGTGTATCATATGCCAAGTACGCCCCCTATTGACGTCAATGA |
| | CGGTAAATGGCCCGCCTGGCATTATGCCCAGTACATGACCTTATGGGACTTTCC |
| | TACTTGGCAGTACATCTACGTATTAGTCATCGCTATTACCATGGTCGAGGTGAG |
| | CCCCACGTTCTGCTTCACTCTCCCCATCTCCCCCCCCTCCCCACCCCCAATTTT |
| | GTATTTATTTATTTTTTAATTATTTTGTGCAGCGATGGGGGCGGGGGGGGGGGG |
| | GGGGCGCGCGCCAGGCGGGGCGGGGCGGGGCGAGGGGCGGGGCGGGGCGAGGCG |
| | GAGAGGTGCGGCGGCAGCCAATCAGAGCGGCGCGCTCCGAAAGTTTCCTTTTAT |
| | GGCGAGGCGGCGGCGGCGGCGGCCCTATAAAAAGCGAAGCGCGCGGCGGGCGGG |
| | AGTCGCTGCGCGCTGCCTTCGCCCCGTGCCCCGCTCCGCCGCCGCCTCGCGCCG |
| | CCCGCCCCGGCTCTGACTGACCGCGTTACTCCCACAGGTGAGCGGGCGGGACGG |
| | CCCTTCTCCTCCGGGCTGTAATTAGCGCTTGGTTTAATGACGGCTTGTTTCTTT |
| | TCTGTGGCTGCGTGAAAGCCTTGAGGGGCTCCGGGAGGGCCCTTTGTGCGGGGG |
| | GAGCGGCTCGGGGGGTGCGTGCGTGTGTGTGTGCGTGGGGAGCGCCGCGTGCGG |
| | CTCCGCGCTGCCCGGCGGCTGTGAGCGCTGCGGGCGCGGCGCGGGGCTTTGTGC |
| | GCTCCGCAGTGTGCGCGAGGGGAGCGCGGCCGGGGGCGGTGCCCCGCGGTGCGG |
| | GGGGGGCTGCGAGGGGAACAAAGGCTGCGTGCGGGGTGTGTGCGTGGGGGGGTG |
| | AGCAGGGGGTGTGGGCGCGTCGGTCGGGCTGCAACCCCCCCTGCACCCCCCTCC |
| | CCGAGTTGCTGAGCACGGCCCGGCTTCGGGTGCGGGGCTCCGTACGGGGCGTGG |
| | CGCGGGGCTCGCCGTGCCGGGCGGGGGGTGGCGGCAGGTGGGGGTGCCGGGCGG |
| | GGCGGGGCCGCCTCGGGCCGGGGAGGGCTCGGGGGAGGGGCGCGGCGGCCCCCG |
| | GAGCGCCGGCGGCTGTCGAGGCGCGGCGAGCCGCAGCCATTGCCTTTTATGGTA |
| | ATCGTGCGAGAGGGCGCAGGGACTTCCTTTGTCCCAAATCTGTGCGGAGCCGAA |
| | ATCTGGGAGGCGCCGCCGCACCCCCTCTAGCGGGCGCGGGGCGAAGCGGTGCGG |
| | CGCCGGCAGGAAGGAAATGGGCGGGGAGGGCCTTCGTGCGTCGCCGCGCCGCCG |
| | TCCCCTTCTCCCTCTCCAGCCTCGGGGCTGTCCGCGGGGGGACGGCTGCCTTCG |
| | GGGGGGACGGGGCAGGGCGGGGTTCGGCTTCTGGCGTGTGACCGGCGGCTCTAG |
| | AGCCTCTGCTAACCATGTTCATGCCTTCTTCTTTTTCCTACAGCTCCTGGGCAA |
| | CGTGCTGGTTATTGTGCTGTCTCATCATTTTGGCAAAGAATTCATGTACAGGAT |
| | GCAGCTGCTGCTGCTCATTGCCCTGTCTCTGGCCCTGGTCACCAATTCTGAAGT |
| | GCAGCTTCTGCAGTCTGGTGGTGGTGTTGTGCAGCCTGGTGGCTCTCTGAGACT |
| | GTCTTGTGAAGCCTCTGGCTTCACCTTCAGCAGCTACAGCATGCACTGGGTTAG |
| | ACAGGCCCCTGGCAAAGGCCTGGAATGGCTGACCCTGATCAGCTACAATGGGGT |
| | CAACAAGTACTATGCCAAGTCTGTGAAGGGCAGATTTGCCATCAGCAGAGATGA |
| | CAGCAAGAGCACCCTGTTTCTGCAGATGAACAGCCTGACCACAGATGACACAGC |
| | AGTGTACTACTGTGCCAGATGTCCCATTCCTAGAGCTGCCAGCTACAGAAATGG |
| | GGACAACTACTTTGAGTTTGGCCAGGGCACACTGGTCACAGTGTCCTCTGCCTC |
| | TACAAAGGGCCCCTCTGTGTTTCCTCTGGCTCCTAGCAGCAAGTCCACCAGTGG |
| | TGGTACAGCTGCCCTGGGCTGTCTGGTCAAGGATTACTTCCCTGAGCCTGTGAC |
| | TGTGTCCTGGAATTCTGGGGCTCTGACCTCTGGGGTGCACACCTTTCCAGCTGT |
| | GCTGCAGTCCTCTGGCCTGTACTCTCTGTCCTCTGTGGTTACAGTGCCAAGCAG |
| | CTCTCTGGGCACCCAGACCTACATCTGCAATGTGAACCACAAGCCTAGCAACAC |
| | CAAGGTGGACAAGAGAGTGGAACCCAAGAGCTGTGACAAGACCCACAGAAAGAG |
| | AAGAGGCTCTGGAGAAGGCAGAGGCAGCCTGCTGACATGTGGGGATGTTGAAGA |
| | GAATCCTGGGCCTATGTATAGAATGCAACTGCTCCTCCTGATTGCTCTGAGCCT |
| | GGCTCTGGTTACCAACAGCCAGGCTGTGGTCACACAAGAGCCCAGCCTGTCTGT |
| | GTCTCCTGGTGGAACAGTGACCCTGACTTGTGCCCTCTCTTCTGCCTCTGTGTC |
| | CACAAGCAGCTACCCCAGCTGGTATCAGCAGACACCTGGCCAGCCACCTAGAAT |
| | GCTGATCCACAACACTGACACCAGAAGCTCTGGGGTCCCAGACAGATTCTCTGG |
| | CAGCATCCTGGGAAAGAAGGCTGCCCTGACAATCACTGGTGCCCAGGCTGATGA |
| | TGAGTCTGACTACTATTGTGTGGTGTACCTTGGCAATGGCTTTTGGGTGTTCGG |
| | TGGTGGCACCAAACTGACTGTGCTGGGACAGCCTAAAGCTGCCCCTTCTGTGAC |
| | ACTGTTCCCACCTAGCTCTGAGGAACTGCAGGCCAACAAAGCCACACTTGTGTG |
| | CCTGATCTCTGACTTCTACCCTGGGGCTGTGACAGTGGCTTGGAAGGCTGATAG |
| | CAGCCCTGTGAAGGCTGGGGTTGAGACAACCACACCTAGCAAGCAGAGCAACAA |
| | CAAATATGCTGCCTCCAGCTATCTGTCTCTGACCCCTGAGCAGTGGAAGTCCCA |
| | CAGATCCTACAGCTGTCAAGTGACCCATGAGGGCTCCACAGTGGAAAAGACAGT |
| | GGCCCCAACAGAGTGCAGCTGATGACTCGAGGACGGGGTGAACTACGCCTGAGG |
| | ATCCGATCTTTTTCCCTCTGCCAAAAATTATGGGGACATCATGAAGCCCCTTGA |
| | GCATCTGACTTCTGGCTAATAAAGGAAATTTATTTTCATTGCAATAGTGTGTTG |
| | GAATTTTTTGTGTCTCTCACTCGGAAGCAATTCGTTGATCTGAATTTCGACCAC |
| | CCATAATACCCATTACCCTGGTAGATAAGTAGCATGGCGGGTTAATCATTAACT |
| | ACAAGGAACCCCTAGTGATGGAGTTGGCCACTCCCTCTCTGCGCGCTCGCTCGC |
| | TCACTGAGGCCGGGCGACCAAAGGTCGCCCGACGCCCGGGCTTTGCCCGGGCGG |
| | CCTCAGTGAGCGAGCGAGCGCGCAG (SEQ ID NO: 390) |
| 31B6 Fab | ATGTACAGGATGCAGCTGCTGCTGCTCATTGCCCTGTCTCTGGCCCTGGTCACC |
| nucleotide | AATTCTGAAGTGCAGCTTCTGCAGTCTGGTGGTGGTGTTGTGCAGCCTGGTGGC |
| (mIL2- | TCTCTGAGACTGTCTTGTGAAGCCTCTGGCTTCACCTTCAGCAGCTACAGCATG |
| 31B6_HC_Fab- | CACTGGGTTAGACAGGCCCCTGGCAAAGGCCTGGAATGGCTGACCCTGATCAGC |
| FurinT2A-mIL2- | TACAATGGGGTCAACAAGTACTATGCCAAGTCTGTGAAGGGCAGATTTGCCATC |
| 31B6_LC) | AGCAGAGATGACAGCAAGAGCACCCTGTTTCTGCAGATGAACAGCCTGACCACA |
| | GATGACACAGCAGTGTACTACTGTGCCAGATGTCCCATTCCTAGAGCTGCCAGC |
| | TACAGAAATGGGGACAACTACTTTGAGTTTGGCCAGGGCACACTGGTCACAGTG |
| | TCCTCTGCCTCTACAAAGGGCCCCTCTGTGTTTCCTCTGGCTCCTAGCAGCAAG |
| | TCCACCAGTGGTGGTACAGCTGCCCTGGGCTGTCTGGTCAAGGATTACTTCCCT |
| | GAGCCTGTGACTGTGTCCTGGAATTCTGGGGCTCTGACCTCTGGGGTGCACACC |
| | TTTCCAGCTGTGCTGCAGTCCTCTGGCCTGTACTCTCTGTCCTCTGTGGTTACA |
| | GTGCCAAGCAGCTCTCTGGGCACCCAGACCTACATCTGCAATGTGAACCACAAG |
| | CCTAGCAACACCAAGGTGGACAAGAGAGTGGAACCCAAGAGCTGTGACAAGACC |
| | CACAGAAAGAGAAGAGGCTCTGGAGAAGGCAGAGGCAGCCTGCTGACATGTGGG |
| | GATGTTGAAGAGAATCCTGGGCCTATGTATAGAATGCAACTGCTCCTCCTGATT |
| | GCTCTGAGCCTGGCTCTGGTTACCAACAGCCAGGCTGTGGTCACACAAGAGCCC |
| | AGCCTGTCTGTGTCTCCTGGTGGAACAGTGACCCTGACTTGTGCCCTCTCTTCT |
| | GCCTCTGTGTCCACAAGCAGCTACCCCAGCTGGTATCAGCAGACACCTGGCCAG |
| | CCACCTAGAATGCTGATCCACAACACTGACACCAGAAGCTCTGGGGTCCCAGAC |
| | AGATTCTCTGGCAGCATCCTGGGAAAGAAGGCTGCCCTGACAATCACTGGTGCC |
| | CAGGCTGATGATGAGTCTGACTACTATTGTGTGGTGTACCTTGGCAATGGCTTT |
| | TGGGTGTTCGGTGGTGGCACCAAACTGACTGTGCTGGGACAGCCTAAAGCTGCC |
| | CCTTCTGTGACACTGTTCCCACCTAGCTCTGAGGAACTGCAGGCCAACAAAGCC |
| | ACACTTGTGTGCCTGATCTCTGACTTCTACCCTGGGGCTGTGACAGTGGCTTGG |
| | AAGGCTGATAGCAGCCCTGTGAAGGCTGGGGTTGAGACAACCACACCTAGCAAG |
| | CAGAGCAACAACAAATATGCTGCCTCCAGCTATCTGTCTCTGACCCCTGAGCAG |
| | TGGAAGTCCCACAGATCCTACAGCTGTCAAGTGACCCATGAGGGCTCCACAGTG |
| | GAAAAGACAGTGGCCCCAACAGAGTGCAGC (SEQ ID NO: 391) |
| 31B6 Fab | HC (with signal peptide): |
| polypeptides | MYRMQLLLLIALSLALVTNSEVQLLQSGGGVVQPGGSLRLSCEASGFTFSSYSM |
| | HWVRQAPGKGLEWLTLISYNGVNKYYAKSVKGRFAISRDDSKSTLFLQMNSLTT |
| | DDTAVYYCARCPIPRAASYRNGDNYFEFGQGTLVTVSSASTKGPSVFPLAPSSK |
| | STSGGTAALGCLVKDYFPEPVTVSWNSGALTSGVHTFPAVLQSSGLYSLSSVVT |
| | VPSSSLGTQTYICNVNHKPSNTKVDKRVEPKSCDKTH (SEQ ID NO: 392) |
| | HC (no signal): |
| | EVQLLQSGGGVVQPGGSLRLSCEASGFTFSSYSMHWVRQAPGKGLEWLTLISYN |
| | GVNKYYAKSVKGRFAISRDDSKSTLFLQMNSLTTDDTAVYYCARCPIPRAASYR |
| | NGDNYFEFGQGTLVTVSSASTKGPSVFPLAPSSKSTSGGTAALGCLVKDYFPEP |
| | VTVSWNSGALTSGVHTFPAVLQSSGLYSLSSVVTVPSSSLGTQTYICNVNHKPS |
| | NTKVDKRVEPKSCDKTH (SEQ ID NO: 393) |
| | LC (lambda)(with signal peptide): |
| | MYRMQLLLLIALSLALVTNSQAVVTQEPSLSVSPGGTVTLTCALSSASVSTSSY |
| | PSWYQQTPGQPPRMLIHNTDTRSSGVPDRFSGSILGKKAALTITGAQADDESDY |
| | YCVVYLGNGFWVFGGGTKLTVLGQPKAAPSVTLFPPSSEELQANKATLVCLISD |
| | FYPGAVTVAWKADSSPVKAGVETTTPSKQSNNKYAASSYLSLTPEQWKSHRSYS |
| | CQVTHEGSTVEKTVAPTECS (SEQ ID NO: 394) |
| | LC (lambda)(no signal) |
| | QAVVTQEPSLSVSPGGTVTLTCALSSASVSTSSYPSWYQQTPGQPPRMLIHNTD |
| | TRSSGVPDRFSGSILGKKAALTITGAQADDESDYYCVVYLGNGFWVFGGGTKLT |
| | VLGQPKAAPSVTLFPPSSEELQANKATLVCLISDFYPGAVTVAWKADSSPVKAG |
| | VETTTPSKQSNNKYAASSYLSLTPEQWKSHRSYSCQVTHEGSTVEKTVAPTECS |
| | (SEQ ID NO: 395) |

[0387] Cis plasmids comprising each gene cassette described herein were constructed to express Tau-specific mAbs and controls (transgenes) and the entire cassette was flanked by AAV ITRs. The CAG promoter was utilized in these cassettes and is expected to confer expression of the gene therapy vector in all CNS cell types. AAV proviral (cis) plasmids containing these sequence elements can be packaged into infectious vector particles and purified as products for gene therapy. These plasmids can also be transfected into mammalian cells, such as BTEK293 cells, for direct study of transduction efficiency and gene expression, as described herein.

### 6.2 Example 2—Plasmid Expression of Tau-Specific Antibody Expression Cassettes in 293T Cells

[0388] Tau-specific mAb-expressing constructs (AAV cis plasmids) as exemplified in FIG. 1B, including a control construct, all utilizing the universal CAG promoter operably linked to the transgene, were transfected into HEK293T cells. Briefly, 293T cells seeded in 6 well dishes at 800K cells per well, grown in DMEM+10% FBS. 24 hrs later, cells were transfected with 4 ug Tau Plasmid as indicated with 10 ul Lipofectamine 2000 (Invitrogen). Media was replaced with fresh media, without FBS, 8 hrs later. 40 hrs later cell supernatant was collected and subjected to western blotting. Briefly, cell supernatants were spun in a microfuge at 13000 g for 3 minutes to collect cellular debris. Supernatants were prepared to western blotting by mixing with 4× LDS (Invitrogen) and heating to 70° C. for 10 minutes. Equal volumes were loaded onto 4-12% Bis-Tris gels (Invitrogen), electrophoresed then transferred to PVDF. PVDF membrane was immunoblotted with commercially available antibodies to mouse heavy chain and mouse Kappa or Lambda light chains. Antibodies 43A11 IgG2a (43), 31B6 IgG2a (M3), 4P3 IgG2a (M4) and 8H1 IgG2a (M8) are full-length chimeric antibodies having human variable domains and mouse IgG2a Fc. Antibodies 4P3 (M4) and 8H1 (M8) have Kappa light chains, and 31B6 have lambda light chains. All six plasmids express and secrete antibodies that migrate as distinct heavy chain and light chain polypeptides, as anticipated. FIG. 3. Note that 31B6 IgG2a LALAPG, 4P3 IgG2a LALAPG and 8H1 IgG2a LALAPG antibodies have a modified Fc domain (LALAPG) with mutations within the effector domain of the antibodies that reduce effector function.

### 6.3 Example 3—Tau-Specific Binding of Antibodies Expressed from Gene Cassettes in 293T Cells

[0389] In analogous cell culture experiments to Example 2, Tau-specific mAb-expressing constructs (AAV cis plasmids) having full-length vectorized antibody expression cassettes as depicted in FIG. 1B, were transfected into HEK293T cells and assessed for gene expression and their binding specificity subject to indirect ELISA.

[0390] Indirect ELISA was performed using 96-well half-area microplates (Corning Incorporated, Corning, USA) coated with either recombinant full-length human Tau (rPeptide, Watkinsville, USA) or with BSA (Sigma-Aldrich, Buchs, Switzerland) at a concentration of 3 μg/ml in coating buffer (15 mM Na2CO3, 35 mM NaHCO₃, pH 9.42) overnight at 4° C. or with 96-well half-area microplates (Corning Incorporated, Corning, USA) coated with the synthetic BSA-coupled phosphorylated Tau peptides (Schafer-N, Copenhagen, Denmark) or with BSA (Sigma-Aldrich, Buchs, Switzerland) at a concentration of 5 μg/ml in coating buffer (15 mM Na2CO3, 35 mM NaHCO₃, pH 9.42) overnight at 4° C. Non-specific binding sites were blocked for 1 h at room temperature with PBS/0.1% Tween®-20 containing 2% BSA (Sigma-Aldrich, Buchs, Switzerland).

[0391] HEK293T cell supernatants diluted 1:2 or 1:10 in PBS were added and incubated for 2 h at room temperature, followed by incubation with an HRP-conjugated goat anti-mouse IgG (H+L)-specific antibody (Jackson ImmunoResearch Laboratories, Inc, West Grove, USA, 1:4′000). Standard curves were prepared by two-fold serial dilutions of Recombinant 4P3 IgG2a, 31B6 IgG2a and 8H1 IgG2a in PBS with an initial antibody concentration of 100 nM. Binding was determined by measurement of HRP activity in a standard colorimetric assay. Antibody levels in the HEK293T cell supernatants were estimated by linear regression using GraphPad Prism software (San Diego, USA).

[0392] Antibody levels in the HEK293T cell supernatants as determined by indirect ELISA, are listed in Table 12—as quantitative measures of binding to the Tau target for each antibody expressed by the AAV cis plasmids.

TABLE 12
AAV Cis plasmid-expressed Antibodies Binding Tau

| Antibody | Target | Concentration | |
|---|---|---|---|
| 31B6 IgG2a | Tau pS202/pT205 | 88 | nM |
| 4P3 IgG2a | Recombinant Tau | 15 | nM |
| 8H1 IgG2a | Tau pT212/pS214 | 39 | nM |
| 31B6 IgG2a LALAPG | Tau pS202/pT205 | 100 | nM |
| 4P3 IgG2a LALAPG | Recombinant Tau | 14 | nM |
| 8H1 IgG2a LALAPG | Tau pT212/pS214 | 60 | nM |

### 6.4 Example 4—Full-Length Tau-Specific Antibodies Expressed in 293T Cell Line Transduced with Viral Vectors

### In Vitro Transduction and Expression of Vectorized Antibody

[0393] Cis plasmids expressing vectorized antibody were packaged in AAV9 by well-known benchtop rAAV production methods, starting with “triple” transfection, cells were transfected with polyethylenimine (PEI) and three plasmids encoding 1) transgene (cis plasmid as described herein), 2) AAV2/9 Rep/Cap, and 3) adenovirus helper genes. Transfected cultures were maintained for 5 days following transfection to allow AAV production, AAV was collected and purified from the culture supernatants, then rAAV particles were evaluated for potency of the transduction of the AAV in an HEK cell line expressing AAV receptors. The rAAV transgenes contain antibody light chain and heavy chain IgG transgene which are arranged as multicistrons driven by the same promoter as described in Example 1 and FIG. 1B (full-length antibody light chain and antibody heavy chain genes were separated by a furin T2A linker to ensure separate expression of each antibody chain). The expressed antibodies include the control 43A11, full length 4P3, and 4P3-LALAPG antibody (having a LALAPG mutant Fc), full length 31B6, and 31B6-LALAPG antibody (having a LALAPG mutant Fc), 8H1, and 8H1-LALAPG (having a LALAPG mutant Fc). The entire antibody cassette is flanked by AAV2 ITRs, and the genome is encapsidated in an AAV9 capsid for delivery to HEK293T cells stably expressing an AAV receptor (AAVR) (le10 gc per well).

[0394] Briefly, HEK293T.AAVR cells were plated and transduced at 1E4 or 1E5 MOI (multiplicity of infection) with AAV2/9-Tau AGT vectors. Media was replaced 8 hours later, and 40 hours later supernatant was collected and immunoblotted to confirm antibody expression. As with plasmid transfection, all vectors produced antibody, including the heavy and light chains, as shown in FIGS. 4A-4B.

### 6.5 Example 5—In Vivo Expression of Vectorized Antibody Injected ICV in Neonatal C57BL/6 Mice

[0395] Neonatal (P0/P1) C57BL/6 mice were anaesthetized using isoflurane inhalation. Mice were placed on a heating pad to maintain body temperature during surgery and recovery phase. AAV9 gene therapy vectors encoding 4P3 IgG2a and 4P3 IgG2a LALAPG were administered by bilateral intracerebroventricular (lateral ventricle) injections at three different doses: 2.4e9 gc/side (low dose), 1.2e10 gc/side (mid dose), and 6e10 gc/side (high dose) (n=5 per group, see Table 13). Four weeks post administration, mice were deeply anesthetized (i.p. injection of ketamine 12.5 mg/ml (1.25%) and xylazine 2.5 mg/ml (0.25%) in PBS with 10 l/g body weight) and blood was withdrawn from the vena cava before mice were transcardially perfused with cold phosphate-buffered saline/heparin through the left ventricle. Blood samples were collected into BD Microtainer K2E tubes and processed according to manufacturer's protocol for obtaining blood plasma. Brains were then dissected: left hemibrains were fixed in phosphate-buffered 4% paraformaldehyde solution overnight at 4° C. whereas right hemibrains were further dissected for isolating cortex, hippocampus and striatum that were then fresh frozen on dry ice. Paraformaldehyde-fixed hemibrains were then processed on a Shandon Citadel 2000 Tissue Processor (Thermo Scientific), paraffin-embedded, and cut into 3-μm sagittal sections.

[0396] Frozen tissues (cortex, hippocampus, and striatum) were homogenized using DEA buffer (50 mM NaCl (Sigma-Aldrich, Buchs, Switzerland) and 0,2% diethylamine (Sigma-Aldrich, Buchs, Switzerland) in ddH₂0) complemented with PhosphoSTOP and cOmplete tablets (Roche, Basel, Switzerland). Soluble fractions were collected after spinning down the homogenates for 60 min at 18213 rpm. Samples were stored at −80° C. until use.

[0397] 96-well microplates (Corning Incorporated, Corning, USA) were coated with goat anti-mouse IgG2a antibody (Southern Biotech, Birmingham, USA) at a concentration of 1 μg/ml in PBS overnight at 4° C. Non-specific binding sites were blocked for 1 h at RT with PBS/0.1% Tween®-20 containing 2% BSA (Sigma-Aldrich, Buchs, Switzerland). Plasma samples diluted to either 1:50000 or 1:20000 or 1:1000 in PBS or brain homogenates (5 μl diluted at 1:100) were added and incubated for 2 h at RT, followed by incubation with a goat anti-mouse IgG2a-specific antibody conjugated with HRP (Southern Biotech, Birmingham, USA). Standard curves were prepared by two-fold serial dilutions of recombinant 4P3 IgG2a antibody in PBS with initial antibody concentration at 1 nM or 2 nM. Binding was determined by measurement of HRP activity in a standard colorimetric assay. Drug plasma and brain levels were estimated by linear regression using GraphPad Prism software (San Diego, USA)

[0398] Formalin fixed, paraffin-embedded sections (3 μm) were deparaffinized in xylene and rehydrated through graded ethanol. Quenching of endogenous peroxidase activity was achieved by treatment with 3% H₂O₂ in methanol for 10 min at RT. Non-specific binding sites were blocked for 1 h at RT with PBS/5% serum (horse/goat)/4% BSA. After the blocking step, sections were incubated with biotinylated goat anti-mouse IgG2a antibody (1:50 dilution, Southern Biotech, Birmingham, USA) for 3 h at RT. Antibody signal was amplified with the Vectastain Elite ABC kit (Vector Laboratories, Burlingame, USA) and detected with diaminobenzidine (DAB, Thermo Scientific, Rockford, USA). Slides were mounted using Eukitt® mounting medium (O. Kindler GmbH; Freiburg, Germany). Bright-field imaging was performed using a Dotslide VS120 slide scanner (Olympus Schweiz AG, Switzerland).

TABLE 13

| | Mouse | Group | | Dose (gc/ | Application | |
|---|---|---|---|---|---|---|
| Group | line | size | AAV vector | animal) | route | Takedown |
| 1 | C57BL/6 | n = 5 | 4P3 IgG2a | 1.2e11 | icv | 4 weeks p.i. |
| 2 | C57BL/6 | n = 5 | 4P3 IgG2a | 2.4e10 | icv | 4 weeks p.i. |
| 3 | C57BL/6 | n = 5 | 4P3 IgG2a | 4.8e9 | icv | 4 weeks p.i. |
| 4 | C57BL/6 | n = 5 | 4P3 IgG2a LALAPG | 1.2e11 | icv | 4 weeks p.i. |
| 5 | C57BL/6 | n = 5 | 4P3 IgG2a LALAPG | 2.4e10 | icv | 4 weeks p.i. |
| 6 | C57BL/6 | n = 5 | 4P3 IgG2a LALAPG | 4.8e9 | icv | 4 weeks p.i. |

[0399] Antibody levels were detected in plasma by sandwich ELISA, in a dose dependent manner, indicating likely peripheral transduction. Antibody levels were detected in the range of 5000 nM to more than 8000 nM in plasma when administered at the highest dose of 1.2e11 gc/animal, as seen in FIG. 5.

[0400] Antibody expression was also detected by immunohistochemistry staining (anti-IgG2a antibody) in cells of the hippocampus, and 4P3 IgG2a and 4P3 IgG2a LALAPG expression is considered comparable (data not shown).

[0401] Brain regions hippocampus, striatum and cortex were further collected, homogenized and antibody concentration was determined (sandwich ELISA) showing dose-dependent antibody levels. Antibody concentration (nM) in the homogenates from cortex (FIG. 6A), hippocampus (FIG. 6B) and striatum (FIG. 6C) are shown. ICV administration appears to achieve the highest antibody concentrations in the cortex, followed by hippocampus, followed by striatum, in this experiment.

### 6.6 Example 6—In Vivo Expression of Vectorized Antibody Injected Via Various Routes of CNS Administration in Adult C57BL/6 Mice

[0402] Adult C57BL/6 mice were anaesthetized using an intraperitoneal (i.p.) injection of a mixture of fentanyl (0.05 mg/kg), midazolam (5.0 mg/kg), and medetomidin (0.5 mg/kg) in saline. A loss of response to nociceptive stimulation of the tail and between the toes indicated deep sedation. Mice were placed on a heating pad to maintain body temperature during surgery, and eye cream (Viscotears, carbomerum 980, 2.0 mg) was applied onto the eyes to prevent drying out during the surgery. AAV9 gene therapy vector encoding 4P3 IgG2a was administered by bilateral intracerebroventricular (lateral ventricle), intrahippocampal or intrastriatal injections at a dose of 1.2e10 gc/side (mid dose) (n=5 per group, see Table 14). Bilateral stereotaxic injections of 2.0 μl of 4P3 IgG2a were performed by drilling a hole in the skull at the injection site and placing a Hamilton syringe into either the lateral ventricle (A/P, −0.6 mm from bregma; L, ±1.0 mm; D/V, −2.0 mm), or the hippocampus (A/P, −2.0 mm from bregma; L, ±1.6 mm; D/V, −1.7 mm) or the striatum (A/P, +0.2 mm from bregma; L, +2.0 mm; D/V, −3.2 mm). The injection speed was 0.2 μL/minute and the needle was kept in place for an additional 10 minutes before it was slowly withdrawn. The surgical area was cleaned with sterile saline and the incision was sutured. Immediately after the surgery the antidote was administered intraperitoneally, a mixture containing flumazenil (0.5 mg/kg) and atipamezol (2.5 mg/kg) in saline. Mice were monitored until recovery from anesthesia. In addition to the routine monitoring by animal care takers, operated animals were checked daily for the 3 days following surgery for recovery of the wounds, as well as weekly for signs of abnormal behavior until the time of sacrifice for sample collection. Mice were provided with 200 mg/kg paracetamol in the drinking water starting 24 hours prior to the surgery and over a period of the next 7 days. Four weeks post administration, mice were deeply anesthetized (i.p. injection of ketamine 12.5 mg/ml (1.25%) and xylazine 2.5 mg/ml (0.25%) in PBS with 10 μl/g body weight) and blood was withdrawn from the vena cava before mice were transcardially perfused with cold phosphate-buffered saline/heparin through the left ventricle. Blood samples were collected into BD Microtainer K2E tubes and processed according to manufacturer's protocol for obtaining blood plasma. Brains were then dissected: left hemibrains were fixed in phosphate-buffered 4% paraformaldehyde solution overnight at 4° C. whereas right hemibrains were further dissected for isolating cortex, hippocampus and striatum that were then fresh frozen on dry ice. Paraformaldehyde-fixed hemibrains were then processed on a Shandon Citadel 2000 Tissue Processor (Thermo Scientific), paraffin-embedded, and cut into 3-μm sagittal sections.

[0403] Frozen tissues (cortex, hippocampus, and striatum) were homogenized using DEA buffer (50 mM NaCl (Sigma-Aldrich, Buchs, Switzerland) and 0,2% diethylamine (Sigma-Aldrich, Buchs, Switzerland) in ddH₂0) complemented with PhosphoSTOP and cOmplete tablets (Roche, Basel, Switzerland). Soluble fractions were collected after spinning down the homogenates for 60 min at 18213 rpm. Samples were stored at −80° C. until use.

[0404] 96-well microplates (Corning Incorporated, Corning, USA) were coated with goat anti-mouse IgG2a antibody (Southern Biotech, Birmingham, USA) at a concentration of 1 μg/ml in PBS overnight at 4° C. Non-specific binding sites were blocked for 1 h at RT with PBS/0.1% Tween®-20 containing 2% BSA (Sigma-Aldrich, Buchs, Switzerland). Plasma samples diluted to either 1:400 or 1:200 or 1:100 in PBS or brain homogenates (hippocampus, 10 μl diluted at 1:100; cortex, 1 μl undiluted; striatum, 0.5 μl undiluted in PBS) were added and incubated for 2 h at RT, followed by incubation with a goat anti-mouse IgG2a-specific antibody conjugated with HRP (Southern Biotech, Birmingham, USA). Standard curves were prepared by two-fold serial dilutions of recombinant 4P3 IgG2a antibody in PBS with initial antibody concentration at 1 nM or 2 nM. Binding was determined by measurement of HRP activity in a standard colorimetric assay. Drug plasma and brain levels were estimated by linear regression using GraphPad Prism software (San Diego, USA).

[0405] Formalin fixed, paraffin-embedded sections (3 μm) were deparaffinized in xylene and rehydrated through graded ethanol. Quenching of endogenous peroxidase activity was achieved by treatment with 3% H₂O₂ in methanol for 10 min at RT. Non-specific binding sites were blocked for 1 h at RT with PBS/5% serum (horse/goat)/4% BSA. After the blocking step, sections were incubated with biotinylated goat anti-mouse IgG2a antibody (1:50 dilution, Southern Biotech, Birmingham, USA) for 3 h at RT. Antibody signal was amplified with the Vectastain Elite ABC kit (Vector Laboratories, Burlingame, USA) and detected with diaminobenzidine (DAB, Thermo Scientific, Rockford, USA). Slides were mounted using Eukitt® mounting medium (O. Kindler GmbH; Freiburg, Germany). Bright-field imaging was performed using a Dotslide VS120 slide scanner (Olympus Schweiz AG, Switzerland).

TABLE 14

| | Mouse | Group | AAV | Dose (gc/ | | |
|---|---|---|---|---|---|---|
| Group | line | size | vector | animal) | Application route | Takedown |
| 1 | C57BL6 | n = 5 | 4P3 IgG2a | 2.4e10 | icv | 4 weeks p.i. |
| 2 | C57BL6 | n = 5 | 4P3 IgG2a | 2.4e10 | intrahippocampal | 4 weeks p.i. |
| 3 | C57BL6 | n = 5 | 4P3 IgG2a | 2.4e10 | intrastriatal | 4 weeks p.i. |

[0406] FIG. 7 shows the antibody levels detected in plasma 4 weeks after dosing by intrahippocampal administration, intrastriatal administration or intraventricular administration. The presence of antibody in the plasma indicated likely peripheral transduction, with the highest peripheral concentration coming from vector administered by ICV (FIG. 7). Antibody expression was detected by immunohistochemistry staining (anti-IgG2a antibody) in cells of the hippocampus, and 4P3 IgG2a expression is detectable via all routes of administration tested, intrahippocampal administration, intraventricular administration, and intrastriatal administration (data not shown). Brain regions hippocampus, cortex and striatum, respectively, were collected, homogenized and antibody concentration was determined as depicted in FIGS. 8A-8C.

[0407] Intraparenchymal administration showed highest concentration in the brain region where vector was delivered (IP-hippocampus had the highest concentration in the hippocampus, and IP-Striatum gave the highest concentration in the striatum). ICV delivered reasonably consistent antibody levels across all three tissues. See FIGS. 8A-8C.

### 6.7 Example 7—In Vivo Expression of Vectorized scFv-Fc Injected ICV or Intrahippocampal in Adult C57BL/6 Mice

[0408] Adult C57BL/6 mice were treated in a similar manner described in Example 6. Table 15 shows the treatment groups, dosage and application route. The sequence identifier for the amino acid sequence of the antibody encoded by the vector administered is indicated. The CAG promoter is the promoter for all constructs in this experiment.

TABLE 15

| Mouse | | Dose | Administration | Group | Time |
|---|---|---|---|---|---|
| line | Treatment group | [vg/side] | route | size | point |
| C57BL/6 | AAV9-null | 1.2 × 10¹⁰ | ICV, bilateral | n = 3 | 4 weeks |
| | 4P3 IgG2a | | | | p.i. |
| | (Encoded by SEQ ID NO: 74) | | | | |
| | 4P3-HL-L3 scFv-Fc | | | | |
| | (SEQ ID NO: 242Construct | | | | |
| | SEQ ID NO: 369) | | | | |
| | 31B6-HL-L3 scFv-Fc | | | | |
| | (SEQ ID NO: 263; | | | | |
| | Construct SEQ ID NO: 372)) | | | | |
| | 43A11-HL-L3 scFv-Fc | | | | |
| | (Construct SEQ ID NO: 375) | | | | |
| | EGFP | | | | |
| | 4P3-HL-L3 scFv-Fc | | Intrahippocamp | | |
| | (SEQ ID NO: 242; | | al, bilateral | | |
| | Construct SEQ ID NO: 369) | | | | |

[0409] Adult C57BL/6 mice were anaesthetized using an intraperitoneal (i.p.) injection of a mixture of fentanyl (0.05 mg/kg), midazolam (5.0 mg/kg), and medetomidin (0.5 mg/kg) in saline. A loss of response to nociceptive stimulation of the tail and between the toes indicated deep sedation. Mice were placed on a heating pad to maintain body temperature during surgery, and eye cream (Viscotears, carbomerum 980, 2.0 mg) was applied onto the eyes to prevent drying out during the surgery. Gene therapy vectors were administered by bilateral intracerebroventricular (lateral ventricle) or intrahippocampal injections at a dose of 1.2e10 gc/side (n=3 per group, see Table 15). Bilateral stereotaxic injections of 2.0 μl of AAV viral vectors were performed by drilling a hole in the skull at the injection site and placing a Hamilton syringe into either the lateral ventricle (A/P, −0.6 mm from bregma; L, ±1.0 mm; D/V, −2.0 mm), or the hippocampus (A/P, −2.0 mm from bregma; L, ±1.6 mm; D/V, −1.7 mm). The injection speed was 0.2 μL/minute and the needle was kept in place for an additional 10 minutes before it was slowly withdrawn. The surgical area was cleaned with sterile saline and the incision was sutured. Immediately after the surgery the antidote was administered intraperitoneally, a mixture containing flumazenil (0.5 mg/kg) and atipamezol (2.5 mg/kg) in saline. Mice were monitored until recovery from anesthesia. In addition to the routine monitoring by animal care takers, operated animals were checked daily for the 3 days following surgery for recovery of the wounds, as well as weekly for signs of abnormal behavior until the time of sacrifice for sample collection. Mice were provided with 200 mg/kg paracetamol in the drinking water starting 24 hours prior to the surgery and over a period of the next 7 days. Four weeks post administration, mice were deeply anesthetized (i.p. injection of ketamine 12.5 mg/ml (1.25%) and xylazine 2.5 mg/ml (0.25%) in PBS with 10 μl/g body weight) and blood was withdrawn from the vena cava before mice were transcardially perfused with cold phosphate-buffered saline/heparin through the left ventricle. Blood samples were collected into BD Microtainer K2E tubes and processed according to manufacturer's protocol for obtaining blood plasma. Brains were then dissected: left hemibrains were fixed in phosphate-buffered 4% paraformaldehyde solution overnight at 4° C. whereas right hemibrains were further dissected for isolating cortex, hippocampus and striatum that were then fresh frozen on dry ice. Paraformaldehyde-fixed hemibrains were then processed on a Shandon Citadel 2000 Tissue Processor (Thermo Scientific), paraffin-embedded, and cut into 3-μm sagittal sections.

[0410] Frozen tissues (cortex, hippocampus, and striatum) were homogenized using DEA buffer (50 mM NaCl (Sigma-Aldrich, Buchs, Switzerland) and 0,2% diethylamine (Sigma-Aldrich, Buchs, Switzerland) in ddH₂0) complemented with PhosphoSTOP and cOmplete tablets (Roche, Basel, Switzerland). Soluble fractions were collected after spinning down the homogenates for 60 min at 18213 rpm. Samples were stored at −80° C. until use.

[0411] 96-well microplates (Corning Incorporated, Corning, USA) were coated with goat anti-mouse IgG2a antibody (Southern Biotech, Birmingham, USA) at a concentration of 1 μg/ml in PBS overnight at 4° C. Non-specific binding sites were blocked for 1 h at RT with PBS/0.1% Tween®-20 containing 2% BSA (Sigma-Aldrich, Buchs, Switzerland). Brain homogenates (hippocampus, 30 μl diluted at either 1:200 or 1:500; cortex, 30 μl diluted at either 1:20, 1:40, or 1:200; striatum, 30 μl diluted at either 1:20 or 1:40 in PBS) were added and incubated for 2 h at RT, followed by incubation with a goat anti-mouse IgG2a-specific antibody conjugated with HRP (Southern Biotech, Birmingham, USA). Standard curves were prepared by two-fold serial dilutions of recombinant 4P3 IgG2a antibody in PBS with initial antibody concentration at 1 nM or 2 nM. Binding was determined by measurement of HRP activity in a standard colorimetric assay. Antibody concentrations in brain homogenates were estimated by linear regression using GraphPad Prism software (San Diego, USA).

[0412] Formalin fixed, paraffin-embedded sections (3 μm) were deparaffinized in xylene and rehydrated through graded ethanol. Quenching of endogenous peroxidase activity was achieved by treatment with 3% H₂O₂ in methanol for 10 min at RT. Non-specific binding sites were blocked for 1 h at RT with PBS/5% serum (horse/goat)/4% BSA. After the blocking step, sections were incubated with biotinylated goat anti-mouse IgG2a antibody (1:50 dilution, Southern Biotech, Birmingham, USA) for 3 h at RT. Antibody signal was amplified with the Vectastain Elite ABC kit (Vector Laboratories, Burlingame, USA) and detected with diaminobenzidine (DAB, Thermo Scientific, Rockford, USA). Slides were mounted using Eukitt® mounting medium (O. Kindler GmbH; Freiburg, Germany). Bright-field imaging was performed using a Dotslide VS120 slide scanner (Olympus Schweiz AG, Switzerland).

[0413] Brain regions hippocampus, striatum and cortex were collected, homogenized and scFv-Fc concentration was determined. scFv-Fc expression was also detected by immunohistochemistry staining (anti-IgG2a antibody) in cells of the hippocampus after administration either intrahippocampal or ICV (data not shown). FIGS. 9A-9C show antibody concentration (nM) in the collected homogenates from the cortex (A), hippocampus (B), and striatum (C). 4P3 IgG2a expression is detectable via all routes of administration tested in all brain regions.

[0414] It is noted that the concentration of scFv-Fc derivative is underestimated due to the use of 4P3 IgG2a as standard curve (⅓ MW difference). Nevertheless, the concentrations are semi-quantitative and accounting for the underestimate, the scFv-Fc constructs, delivered either ICV or by intrahippocampal administration, are expressed at higher levels than the 4P3 IgG2a antibody. Both the full length 4P3 IgG2a and the scFv-Fc proteins are expressed in the hippocampus and the cortex by ICB administration.

[0415] The eGFP sequences used in the described experiments are:

eGFP coding sequence
(SEQ ID NO: 396)
ATGGTGAGCAAGGGCGAGGAGCTGTTCACCGGGGTGGTGCCCATCCTGGTCGAGCTGGACGGCGACGTAAA
CGGCCACAAGTTCAGCGTGTCCGGCGAGGGCGAGGGCGATGCCACCTACGGCAAGCTGACCCTGAAGTTCA
TCTGCACCACCGGCAAGCTGCCCGTGCCCTGGCCCACCCTCGTGACCACCCTGACCTACGGCGTGCAGTGC
TTCAGCCGCTACCCCGACCACATGAAGCAGCACGACTTCTTCAAGTCCGCCATGCCCGAAGGCTACGTCCA
GGAGCGCACCATCTTCTTCAAGGACGACGGCAACTACAAGACCCGCGCCGAGGTGAAGTTCGAGGGCGACA
CCCTGGTGAACCGCATCGAGCTGAAGGGCATCGACTTCAAGGAGGACGGCAACATCCTGGGGCACAAGCTG
GAGTACAACTACAACAGCCACAACGTCTATATCATGGCCGACAAGCAGAAGAACGGCATCAAGGTGAACTT
CAAGATCCGCCACAACATCGAGGACGGCAGCGTGCAGCTCGCCGACCACTACCAGCAGAACACCCCCATCG
GCGACGGCCCCGTGCTGCTGCCCGACAACCACTACCTGAGCACCCAGTCCGCCCTGAGCAAAGACCCCAAC
GAGAAGCGCGATCACATGGTCCTGCTGGAGTTCGTGACCGCCGCCGGGATCACTCTCGGCATGGACGAGCT
GTACAAGTAA
eGFP protein
(SEQ ID NO: 397)
MVSKGEELFTGVVPILVELDGDVNGHKFSVSGEGEGDATYGKLTLKFICTTGKLPVPWPTLVTTLTYGVQC
FSRYPDHMKQHDFFKSAMPEGYVQERTIFFKDDGNYKTRAEVKFEGDTLVNRIELKGIDFKEDGNILGHKL
EYNYNSHNVYIMADKQKNGIKVNFKIRHNIEDGSVQLADHYQQNTPIGDGPVLLPDNHYLSTQSALSKDPN
EKRDHMVLLEFVTAAGITLGMDELYK

### 6.8 Example 8—In Vivo Expression of Vectorized mAbs and scFv-Fc Injected ICV or Intrahippocampal in Adult C57BL/6 Mice

[0416] Adult C57BL/6 mice were treated in a similar manner described in Example 6. Mice were administered AAV9 containing vectorized constructs as set forth in Table 16, including constructs for expression of the full length 4P3 antibody under control of the CAG, GFAP or hSyn promoter, and the 4P3 HL-L3 scFV-Fc construct under the control of the CAG promoter (administered bilaterally either ICV or intrahippocampal).

TABLE 16
Treatment groups, dosage and application route

| Mouse | Treatment | Dose | Administration | Group | Time |
|---|---|---|---|---|---|
| line | group | [vg/side] | route | size | point |
| C57BL/6 | CAG-4P3 IgG2a | 1.2 × 10¹⁰ | Bilateral, IP- | n = 3 | 4 weeks |
| | GFAP.4P3 IgG2a | | hippocampus | | p.i. |
| | hSyn.4P3 IgG2a | | | | |
| | CAG.4P3.HL-L3 scFv-Fc | | | | |
| | CAG.4P3 HL-L3 scFv-Fc | | Bilateral, ICV | | |
| | Formulation buffer | n/a, 2 ul | Bilateral, IP- | | |
| | | | hippocampus | | |

[0417] Adult C57BL/6 mice were anaesthetized using an intraperitoneal (i.p.) injection of a mixture of fentanyl (0.05 mg/kg), midazolam (5.0 mg/kg), and medetomidin (0.5 mg/kg) in saline. A loss of response to nociceptive stimulation of the tail and between the toes indicated deep sedation. Mice were placed on a heating pad to maintain body temperature during surgery, and eye cream (Viscotears, carbomerum 980, 2.0 mg) was applied onto the eyes to prevent drying out during the surgery. Gene therapy vectors (see Table 15) were administered by bilateral intracerebroventricular (lateral ventricle) or intrahippocampal injections at a dose of 1.2e10 gc/side (n=3 per group, see Table 16). Bilateral stereotaxic injections of 2.0 μl of AAV viral vectors were performed by drilling a hole in the skull at the injection site and placing a Hamilton syringe into either the lateral ventricle (A/P, −0.6 mm from bregma; L, ±1.0 mm; D/V, −2.0 mm), or the hippocampus (A/P, −2.0 mm from bregma; L, ±1.6 mm; D/V, −1.7 mm). The injection speed was 0.2 L/minute and the needle was kept in place for an additional 10 minutes before it was slowly withdrawn. The surgical area was cleaned with sterile saline and the incision was sutured. Immediately after the surgery the antidote was administered intraperitoneally, a mixture containing flumazenil (0.5 mg/kg) and atipamezol (2.5 mg/kg) in saline. Mice were monitored until recovery from anesthesia. In addition to the routine monitoring by animal care takers, operated animals were checked daily for the 3 days following surgery for recovery of the wounds, as well as weekly for signs of abnormal behavior until the time of sacrifice for sample collection. Mice were provided with 200 mg/kg paracetamol in the drinking water starting 24 hours prior to the surgery and over a period of the next 7 days. Four weeks post administration, mice were deeply anesthetized (i.p. injection of ketamine 12.5 mg/ml (1.25%) and xylazine 2.5 mg/ml (0.25%) in PBS with 10 μl/g body weight) and blood was withdrawn from the vena cava before mice were transcardially perfused with cold phosphate-buffered saline/heparin through the left ventricle. Blood samples were collected into BD Microtainer K2E tubes and processed according to manufacturer's protocol for obtaining blood plasma. Brains were then dissected: left hemibrains were fixed in phosphate-buffered 4% paraformaldehyde solution overnight at 4° C. whereas right hemibrains were further dissected for isolating cortex, hippocampus and striatum that were then fresh frozen on dry ice.

[0418] Frozen tissues (cortex, hippocampus, and striatum) were homogenized using DEA buffer (50 mM NaCl (Sigma-Aldrich, Buchs, Switzerland) and 0,2% diethylamine (Sigma-Aldrich, Buchs, Switzerland) in ddH₂0) complemented with PhosphoSTOP and cOmplete tablets (Roche, Basel, Switzerland). Soluble fractions were collected after spinning down the homogenates for 60 min at 18213 rpm. Samples were stored at −80° C. until use.

[0419] 96-well microplates (Corning Incorporated, Corning, USA) were coated with goat anti-mouse IgG2a antibody (Southern Biotech, Birmingham, USA) at a concentration of 1 μg/ml in PBS overnight at 4° C. Non-specific binding sites were blocked for 1 h at RT with PBS/0.1% Tween®-20 containing 2% BSA (Sigma-Aldrich, Buchs, Switzerland). Brain homogenates (hippocampus, 30 μl diluted at either 1:200, or 1:100, or 1:500; cortex, 30 μl diluted at either 1:20, or 1:300; striatum, 30 μl diluted at either 1:5, or 1:20 in PBS) were added and incubated for 2 h at RT, followed by incubation with a goat anti-mouse IgG2a-specific antibody conjugated with HRP (Southern Biotech, Birmingham, USA). Standard curves were prepared by two-fold serial dilutions of recombinant 4P3 IgG2a antibody in PBS with initial antibody concentration at 1 nM or 2 nM. Binding was determined by measurement of HRP activity in a standard colorimetric assay. Brain homogenate concentrations were estimated by linear regression using GraphPad Prism software (San Diego, USA).

[0420] FIGS. 10A-10C show antibody concentration (nM) for the antibodies or scFv-Fcs expressed from the administered vectors in the homogenates of cortex (A), striatum (B), and hippocampus (C). As noted in Table 16 above, all vectors were administered intrahippocampal except for the one treatment group in which the 4P3-HL-L3 scFv-Fc was administered ICV. It is noted that the concentration of scFv-Fc derivative is underestimated due to the use of 4P3 IgG2a as standard curve (⅓ MW difference). Nevertheless, the concentrations are semi-quantitative and accounting for the underestimate, the scFv-Fc constructs, are generally expressed at higher levels in the cortex, striatum and hippocampus than the IgG2a constructs

### 6.9 Example 9—Longer Term In Vivo Expression of Vectorized Antibody Injected in Adult C57BL/6 Mice

[0421] Adult C57BL/6 mice were treated in a similar manner described in Example 6. AAV9 constructs encoding 4P3 IgG2a (including hSyn-4P3 IgG2a and GFAP-4P3 IgG2a) and the 4P3 IgG2a antibody were administered as described in Table 17, which shows the treatment groups, dosage and application route.

TABLE 17

| Mouse | Treatment | Dose | Administration | |
|---|---|---|---|---|
| line | group | [vg/side] | route | Timepoints |
| C57BL/6 | AAV9-null | 1.2 × 10¹⁰ | intrahippocampal; | 1 month |
| | hSyn-4P3 | 1.2 × 10¹⁰ | bilateral | 3 months |
| | IgG2a | | | |
| | GFAP-4P3 | 1.2 × 10¹⁰ | | 6 months |
| | IgG2a | | | |
| | 4P3 Ig2a | 30 mg/kg | Intraperitoneal; | 1 month |
| | (antibody) | | weekly | |

[0422] Adult C57BL/6 mice were anaesthetized using an intraperitoneal (i.p.) injection of a mixture of fentanyl (0.05 mg/kg), midazolam (5.0 mg/kg), and medetomidin (0.5 mg/kg) in saline. A loss of response to nociceptive stimulation of the tail and between the toes indicated deep sedation. Mice were placed on a heating pad to maintain body temperature during surgery, and eye cream (Viscotears, carbomerum 980, 2.0 mg) was applied onto the eyes to prevent drying out during the surgery. Gene therapy vectors were administered by bilateral intrahippocampal injections at a dose of 1.2e10 gc/side (n=3 per group, see Table 17). Bilateral stereotaxic injections of 2.0 μl of AAV viral vectors were performed by drilling a hole in the skull at the injection site and placing a Hamilton syringe into the hippocampus (A/P, −2.0 mm from bregma; L, ±1.6 mm; D/V, −1.7 mm). The injection speed was 0.2 μL/minute and the needle was kept in place for an additional 10 minutes before it was slowly withdrawn. The surgical area was cleaned with sterile saline and the incision was sutured. Immediately after the surgery the antidote was administered intraperitoneally, a mixture containing flumazenil (0.5 mg/kg) and atipamezol (2.5 mg/kg) in saline. Mice were monitored until recovery from anesthesia. In addition to the routine monitoring by animal care takers, operated animals were checked daily for the 3 days following surgery for recovery of the wounds, as well as weekly for signs of abnormal behavior until the time of sacrifice for sample collection. Mice were provided with 200 mg/kg paracetamol in the drinking water starting 24 hours prior to the surgery and over a period of the next 7 days. For chronic peripheral antibody treatment, mice were weekly dosed intraperitoneally with the recombinant 4P3 IgG2a antibody at 30 mg/kg. 1 month, 3 months or 6 months post administration, mice were deeply anesthetized (i.p. injection of ketamine 12.5 mg/ml (1.25%) and xylazine 2.5 mg/ml (0.25%) in PBS with 10 μl/g body weight) and blood was withdrawn from the vena cava before mice were transcardially perfused with cold phosphate-buffered saline/heparin through the left ventricle. Blood samples were collected into BD Microtainer K2E tubes and processed according to manufacturer's protocol for obtaining blood plasma. Brains were then dissected: left hemibrains were fixed in phosphate-buffered 4% paraformaldehyde solution overnight at 4° C. whereas right hemibrains were further dissected for isolating cortex, hippocampus and striatum that were then fresh frozen on dry ice. Paraformaldehyde-fixed hemibrains were then processed on a Shandon Citadel 2000 Tissue Processor (Thermo Scientific), paraffin-embedded, and cut into 3-μm sagittal sections.

[0423] Frozen tissues (cortex, hippocampus, and striatum) were homogenized using DEA buffer (50 mM NaCl (Sigma-Aldrich, Buchs, Switzerland) and 0,2% diethylamine (Sigma-Aldrich, Buchs, Switzerland) in ddH₂0) complemented with PhosphoSTOP and cOmplete tablets (Roche, Basel, Switzerland). Soluble fractions were collected after spinning down the homogenates for 60 min at 18213 rpm. Samples were stored at −80° C. until use.

[0424] 96-well microplates (Corning Incorporated, Corning, USA) were coated with goat anti-mouse IgG2a antibody (Southern Biotech, Birmingham, USA) at a concentration of 1 μg/ml in PBS overnight at 4° C. Non-specific binding sites were blocked for 1 h at RT with PBS/0.1% Tween®-20 containing 2% BSA (Sigma-Aldrich, Buchs, Switzerland). Brain homogenates (hippocampus, 30 μl diluted at either 1:50, or 1:200; cortex, 30 μl diluted at 1:50; striatum, 30 μl diluted at either 1:20 in PBS) were added and incubated for 2 h at RT, followed by incubation with a goat anti-mouse IgG2a-specific antibody conjugated with HRP (Southern Biotech, Birmingham, USA). Standard curves were prepared by two-fold serial dilutions of recombinant 4P3 IgG2a antibody in PBS with initial antibody concentration at 1 nM or 2 nM. Binding was determined by measurement of HRP activity in a standard colorimetric assay. Drug plasma and brain levels were estimated by linear regression using GraphPad Prism software (San Diego, USA).

[0425] Formalin fixed, paraffin-embedded sections (3 μm) were deparaffinized in xylene and rehydrated through graded ethanol. Quenching of endogenous peroxidase activity was achieved by treatment with 3% H₂O₂ in methanol for 10 min at RT. Non-specific binding sites were blocked for 1 h at RT with PBS/5% serum (horse/goat)/4% BSA. After the blocking step, sections were incubated with biotinylated goat anti-mouse IgG2a antibody (1:50 dilution, Southern Biotech, Birmingham, USA) for 3 h at RT. Antibody signal was amplified with the Vectastain Elite ABC kit (Vector Laboratories, Burlingame, USA) and detected with diaminobenzidine (DAB, Thermo Scientific, Rockford, USA). Slides were mounted using Eukitt® mounting medium (O. Kindler GmbH; Freiburg, Germany). Bright-field imaging was performed using a Dotslide VS120 slide scanner (Olympus Schweiz AG, Switzerland).

[0426] FIGS. 11A-11C show the results at 1 month and 3 months post treatment. Intraparenchymal administration of hSyn-4P3 IgG2a as well as GFAP-4P3 IgG2a AAV vectors resulted in sustained antibody expression in the brain. hSyn-4P3 IgG2a hippocampal drug levels increased 10-fold as compared to peripheral recombinant antibody dosing (30 mg/kg, once weekly). Brain drug levels increased over time, mainly in the GFAP-4P3 IgG2a-administered animals. hSyn-4P3 IgG2a- and GFAP-4P3 IgG2a-mediated cell type-specific antibody expression was confirmed by IHC (data not shown).

### 6.10 Example 10—Tau Seeding Depletion Assay: Antibodies NI-502.4P3, NI-502.31B6 and NI-502.8H1 Deplete Seeding-Competent Tau from AD Homogenates

### Brain Homogenate Preparation

[0427] Alzheimer's Disease brain tissue (NBB 194-037), inferior frontal gyrus) was procured from the Netherlands Brain Bank (NBB). Tissue was weighed and homogenized in 3× mass/volume of PBS containing protease (cOmplete Tablets, Mini EDTA-free, Roche, Switzerland) and phosphatase (PhosSTOP Tablets, Roche, Switzerland) inhibitors. Tissue was homogenized using FastPrep-24 Homogenizer (Lucerna Chem AG) twice with 6.0 m/s for 40 seconds. After homogenization, homogenates were cleared by centrifugation (Microcentrifuge 5430 R (Vaudaux-Eppendorf AG, Switzerland), full speed for 1.5 hours, 4° C.). Protein concentration in the cleared brain homogenate was determined by BCA protein assay (Pierce™ BCA Protein Assay Kit, Thermo Fischer Scientific, USA) according to the manufacturer's instructions. Total Tau concentration was determined using INNOTEST hTAU Ag ELISA (Fujirebio Europe N.V., Belgium) according to the manufacturer's instructions.

### Immunodepletion Studies

[0428] Brain homogenates containing 10 ng of tau were mixed with 2-fold serially diluted NI-502.4P3, NI-502.31B6 and NI-502.8H1 (final concentrations of 0.31-80 g/mL) in 150 μL of Opti-MEM (Invitrogen, Thermo Fisher Scientific, USA) containing protease inhibitors (cOmplete Tablets, Mini EDTA-free, Roche, Switzerland) and allowed to incubate overnight at 4° C. The next day, 50 μL of protein A magnetic bead slurry (Dynabeads™ ProteinA Immunoprecipitation Kit, Thermo Fisher Scientific, USA) was added to each sample to isolate immune complexes. Immunodepleted supernatants were transferred to clean low binding tubes (Vaudaux-Eppendorf AG, Switzerland). Each immunodepletion reaction was performed in duplicate.

### Tau Seeding Assay in HEK293T Biosensor Cells

[0429] The HEK293T tau biosensor cell line (HEK293T tau RD-CFP/YFP, ATCC® CRL-3275™) was previously described (Holmes et al., Proc. Natl. Acad. Sci. USA 111 (2014), E4376-85, doi: 10.1073/pnas.1411649111). The cells stably express the repeat domains (RD) of tau protein with a P301S mutation fused to either CFP or YFP. Although at baseline the tau reporter proteins exist in a stable, soluble form within the cell, exposure to exogenous tau seeds leads to tau reporter protein aggregation, which generates a fluorescence resonance energy transfer (FRET signal). Tau aggregation was measured by CFP to YFP FRET signal, detected with fluorescence-activated cell sorting (FACS).

[0430] HEK293T tau biosensor cells were plated in 24-well plates (TPP, Switzerland) at 50′000 cells per well in complete HEK Cell culture medium (DMEM/10% FBS/PenStrep/L-Glutamine, Gibco, Thermo Fisher Scientific, USA) and incubated at 37° C., 5% CO2 for 24 or 48 hours. Immunodepleted brain homogenates (200 μL) were mixed with 6 μL Lipofectamine 2000 (Invitrogen, Thermo Fisher Scientific, USA), gently mixed, incubated for 20 min at RT and then added to the cell media. Cells were cultured for another 24 hours, trypsinized, washed, and subjected to FRET analysis of tau aggregation by FACS. Aggregation was evaluated using a CFP-YFP FRET pair. Signals were measured on an LSR II Fortessa 4L flow cytometer (BD Biosciences, Switzerland). Forward scatter signal generated by a 488-nm laser line was used as trigger signal. CFP was excited at 405 nm and fluorescence detected with a 450/50-nm bandpass filter indicated no aggregation. YFP excited by CFP emission (FRET), detected with a 525/50-nm bandpass filter, indicated aggregation. The YFP signal was detected using a 530/30-nm bandpass filter. FCS 3.0 files were analyzed using Flowing Software version 2.5.1 (Turku Centre for Biotechnology). Data were reported as integrated FRET density, which was calculated as previously described (Holmes et al., (2014), supra): Integrated FRET density=number of FRET-positive cells×mean FRET signal intensity.

[0431] As shown in FIGS. 12A-12C, subjecting human brain homogenates derived from Alzheimer's Disease brain tissue with increasing concentrations of antibodies NI-502.4P3, NI-502.31B6 and NI-502.8H1 resulted in a concentration-dependent reduction of Tau aggregation in Tau biosensor cells, which is reflected by the reduction in the integrated FRET density.

### Equivalents

[0432] Although the invention is described in detail with reference to specific embodiments thereof, it will be understood that variations which are functionally equivalent are within the scope of this invention. Indeed, various modifications of the invention in addition to those shown and described herein will become apparent to those skilled in the art from the foregoing description and accompanying drawings. Such modifications are intended to fall within the scope of the appended claims. Those skilled in the art will recognize, or be able to ascertain using no more than routine experimentation, many equivalents to the specific embodiments of the invention described herein. Such equivalents are intended to be encompassed by the following claims. The discussion herein provides a better understanding of the nature of the problems confronting the art and should not be construed in any way as an admission as to prior art nor should the citation of any reference herein be construed as an admission that such reference constitutes “prior art” to the instant application.

[0433] All references including patent applications and publications cited herein are incorporated herein by reference in their entirety and for all purposes to the same extent as if each individual publication or patent or patent application was specifically and individually indicated to be incorporated by reference in its entirety for all purposes.

The application's sequence listing, which the Patent Office published only in electronic form, follows.

SEQUENCE LISTING (397 sequences)

SEQ ID NO: 1 - DNA, 366 bp, Artificial Sequence
  synthetic construct; antibody chain
gaggtgcagctggtgcagtctggagcagaggtgaagaagcccggggagtctctgaagatctcctgtaaggtttctggatacgactttagcaagtactggatcggctgggtgcgccagatgcccgggaaaggcctggagtggatggggctcatctatcctggtgactctgataccagatatagtccatctttggaagggcaagtcagcatctcagccgacaagtccatcagcgccgcctacttgcaattcagcagcctgaaggcctcggacagcgccatgtattattgtgtgaggaagggatatagtgcctaccttggagggtggttcgacccctggggccagggaaccctggtcaccgtctcctcg

SEQ ID NO: 2 - DNA, 339 bp, Artificial Sequence
  synthetic construct; antibody chain
gacatccagttgacccagtctccagactccctggctgcgtctctgggcgagagggtcaccatcaactgcaggtccagccagaatattttttacaactccaacaataagaacttcttagcttggtatcagcagaaagcaggacagtctcctaagttgcttatttactgggcttctacgcgggaatccggggtccctgaccgattcagtggcagcggctctgggacagatttcactctcaccatcagcggcctgcaggctggagatgtggcagtttatttctgtcagcaatattttactgatgctcccactttcggcggagggaccaaggtggagatcaaa

SEQ ID NO: 3 - DNA, 378 bp, Artificial Sequence
  synthetic construct; antibody chain
gaggtgcagctgttgcagtctgggggaggcgtggtccagcctggggggtccctgagactctcctgtgaagcctctggattcaccttcagttcctattctatgcactgggtccgccaggctccaggcaaggggctggaatggctgacacttatctcatataatggagtcaataagtattacgcaaagtccgtgaagggccgattcgccatctccagagacgattccaagagcacactgtttttgcaaatgaacagcctgacaactgacgacacggctgtatattactgtgcgagatgtccaatcccgcgggcggcgtcgtatagaaatggagataattatttcgaattcggccagggcaccctggtcaccgtctcctcg

SEQ ID NO: 4 - DNA, 330 bp, Artificial Sequence
  synthetic construct; antibody chain
caggctgtggtgactcaggagccatcgctctcagtgtcccctggagggacagtcacactcacttgtgccctgagttctgcctcagtctctacttcttcgtaccccagctggtaccagcagaccccaggccagcctccacgcatgctcatccacaacacagacactcgctcttctggtgtccctgatcgcttctctggctccatccttgggaagaaagctgccctcaccatcacgggggcccaggcagatgatgaatctgattactactgtgtggtatatttggggaatggcttttgggtgttcggcggagggaccaagctgaccgtccta

SEQ ID NO: 5 - DNA, 348 bp, Artificial Sequence
  Synthetic construct; antibody chain
gaggtgcagctggtggagtctgggggaggcttggtgcagccgggggggtccctaagactctcctgtgcagcctccggattcacctttagcatctataccatgagctgggtccgccaggctccagggaaggggctggagtgggtctcagctattctcagtgatggtagcacatactatgcagactccgtagagggccgattcaccatctccagagacaattccaagaccaccctgtatctacaaatgaacagcctgacagccgaggacacggccgtatattattgtacaaaacgtgttgaggggagctttcgggggtggggccagggaaccctggtcaccgtctcctcg

SEQ ID NO: 6 - DNA, 327 bp, Artificial Sequence
  Synthetic construct; antibody chain
gaaattgtgatgacacagtctccaggcaccctgtctttgtctccaggggaaagcgccaccctctcctgcagggccagtcagagtgttagcactacctacttagcctggtaccagcagaaacctggccaggctcccaggctcctcatctatggtgcatccagcagggccactggcatcccagacagattcagtggcagtgggtctgggacagacttcactctcacaatcagcagactggagcctgaagattttgcagtgtattactgtcagcagtatggtgggtcacgcttgatcaccttcggccaagggacacgactggagattaaa

SEQ ID NO: 7 - DNA, 2214 bp, Artificial Sequence
  synthetic construct; transgene
atgtacagaatgcagctgctgctgctcattgccctgtctctggccctggtcaccaattctgaggtgcagctggtgcagtctggggctgaagtgaagaagcctggggagagcctgaagatcagctgcaaagtgtctggctatgacttcagcaagtactggattggctgggtcagacagatgcctggcaaaggcctggaatggatgggactgatctaccctggggactctgacaccagatacagccctagcctggaaggccaggtgtccatctctgctgacaagagcatctctgcagcctacctgcagttcagcagcctgaaggcctctgactctgccatgtactactgtgtcagaaagggctactctgcctaccttggaggatggtttgatccttggggccagggcacactggtcacagtgtcctctgctaagacaacagccccttctgtgtaccctctggctcctgtgtgtggggacacaacaggatcctctgtgacactgggctgcctggtcaagggatacttccctgagccagtgacactgacctggaactctggatctctgtcctctggggtgcacacattccctgctgtgctgcagtctgacctgtacaccctgagcagcagtgtgacagtgaccagcagcacatggcccagccagagcatcacctgtaatgtggctcaccctgccagctccaccaaggtggacaagaagattgagcctagaggccccaccatcaagccctgtcctccatgcaagtgtcctgctcctaacctgcttggaggcccctctgtgttcatcttcccacctaagatcaaggatgtgctgatgatctctctgagccccattgtgacctgtgtggtggtggatgtgtctgaggatgaccctgatgtgcagatctcttggtttgtgaacaatgtggaagtgcacacagcccagacacagacccacagagaggactacaacagcaccctgagagtggtgtctgccctgcctatccagcaccaggactggatgagtggcaaagagttcaagtgcaaagtgaacaacaaggacctgcctgctccaattgagagaaccatcagcaagcccaagggctctgttagagcccctcaagtgtatgtgctgcctccacctgaggaagagatgaccaagaaacaagtgaccctgacatgcatggtcacagacttcatgcctgaggacatctatgtggaatggaccaacaatggcaagacagagctgaactacaagaacactgagcctgtgctggactctgatggcagctacttcatgtacagcaagctgagggttgagaagaagaactgggttgagagaaacagctacagctgctctgtggtgcatgagggcctgcacaatcaccacaccaccaagagcttcagcagaacccctggcaagagaaagagaagaggctctggagaaggcagaggctccctgctgacatgtggggatgttgaagagaatcctgggcctatgtataggatgcaactgctcctcctgattgctctgagcctggctcttgtgaccaactctgacatccagctgacacagagccctgacagcctggctgcttctctgggagagagagtgaccatcaactgcagaagctcccagaacatcttctacaacagcaacaacaagaacttcctggcctggtatcagcagaaggctggccagtctcctaagctgctgatctactgggccagcaccagagaatctggggtgccagatagattttctggcagtggctctggcacagacttcaccctgacaatcagtggactgcaggctggggatgttgctgtgtacttctgccagcagtacttcacagatgcccctacctttggtggtggcaccaaggtggaaatcaagagggctgatgctgcccctacagtgtctatcttcccacctagctctgagcagctgaccagtggtggtgcctctgttgtgtgcttcctgaacaacttctaccccaaggacatcaatgtgaagtggaagattgatggctctgagaggcagaatggggtgctgaacagctggacagaccaggacagcaaggactccacctacagcatgagcagcacactgaccctgaccaaggatgagtatgagaggcacaacagctacacctgtgaagccacacacaagaccagcacaagccccattgtgaagtccttcaacagaaatgagtgttaa

SEQ ID NO: 8 - DNA, 2214 bp, Artificial Sequence
  synthetic construct; transgene
atgtacagaatgcagctgctgctgctcattgccctgtctctggccctggtcaccaattctgaggtgcagctgctgcagagtggtggtggtgttgtgcagcctggtggctctctgagactgtcttgtgaagcctctggcttcaccttcagcagctacagcatgcactgggtcagacaggcccctggcaaaggactggaatggctgaccctgatcagctacaatggggtcaacaagtactatgccaagtctgtgaagggcagatttgccatcagcagagatgacagcaagtctaccctgttcctgcagatgaacagcctgaccacagatgacactgctgtgtactactgtgccagatgtcccattcctagagctgccagctacagaaatggggacaactactttgagtttggccagggcaccctggtcacagtgtcctctgctaagacaacagccccttctgtgtaccctctggctcctgtgtgtggggacacaacaggatcctctgtgacactgggctgcctggtcaagggctactttcctgagccagtgacactgacctggaactctggatctctgtcctctggggtgcacacattccctgctgtgctgcagtctgacctgtacaccctgagcagcagtgtgacagtgaccagcagcacatggcccagccagagcatcacctgtaatgtggctcaccctgccagctccaccaaggtggacaagaagattgagcctagaggccccaccatcaagccctgtcctccatgcaagtgtcctgctcctaacctgcttggaggcccctctgtgttcatcttcccacctaagatcaaggatgtgctgatgatctctctgagccccattgtgacctgtgtggtggttgatgtgtctgaggatgacccagatgtgcagatctcttggtttgtgaacaatgtggaagtgcacacagcccagacacagacccacagagaggactacaacagcaccctgagagtggtgtctgccctgcctatccagcaccaggactggatgtctggcaaagagttcaagtgcaaagtgaacaacaaggacctgcctgctccaattgagagaaccatcagcaagcccaagggctctgttagagcccctcaagtgtatgtgctgcctccacctgaggaagagatgaccaagaaacaagtgaccctgacatgcatggtcactgacttcatgcctgaggacatctatgtggaatggaccaacaatggcaagacagagctgaactacaagaacactgagcctgtgctggactctgatggcagctacttcatgtacagcaagctgagggttgagaagaagaactgggttgagagaaacagctactcctgctctgtggtgcatgagggcctgcacaaccatcacaccacaaagagcttcagcagaaccccaggcaagagaaagagaagaggctctggagaaggcagaggctccctgctgacatgtggggatgttgaagagaatcctgggcctatgtataggatgcaactgctcctcctgattgctctgagcctggctcttgtgaccaactctcaggctgtggtcacccaagagcctagcctgtctgtgtctcctggtggcacagtgacactgacatgtgccctgtcctctgcctctgtgtctaccagcagctaccccagctggtatcagcagacacctggccagcctccaagaatgctgatccacaacacagacaccagatcctctggggtgccagacagattctctggcagcatcctgggcaagaaggctgccctgacaatcactggtgcccaggctgatgatgagtctgactactactgtgtggtgtaccttggcaatggcttctgggtgtttggtggtggcaccaagctgacagtgctgggccagcctaaaagcagcccctctgtgacactgttccctccaagctctgaggaactggaaacaaacaaggccacacttgtgtgcaccatcacagacttctaccctggggttgtgacagtggactggaaagtggatggcacccctgtgacacaaggcatggaaaccacacagcccagcaagcagagcaacaacaagtacatggccagctcctatctgaccctgacagccagagcctgggagagacacagctcttacagctgccaagtgacccatgagggccacacagtggaaaagagcctgagcagagctgactgctcttaa

SEQ ID NO: 9 - DNA, 2184 bp, Artificial Sequence
  synthetic construct; transgene
atgtacagaatgcagctgctgctgctcattgccctgtctctggccctggtcaccaattctgaggtgcagctggtggaaagtggtggtggactggttcagcctggtggcagcctgagactgtcttgtgctgcctctggcttcaccttcagcatctacaccatgagctgggtcagacaggctcctggcaaaggcctggaatgggtgtcagctatcctgtctgatggcagcacctactatgctgactctgtggaaggcagattcaccatcagcagagacaacagcaagaccacactgtacctgcagatgaacagcctgacagctgaggacactgctgtgtactactgcaccaagagagtggaaggctccttcagaggctggggacagggaacactggtcactgtgtcctctgccaagacaactgccccttctgtgtaccctctggctcctgtgtgtggggacacaacaggatcctctgtgacactgggctgcctggtcaagggctactttcctgagccagtgacactgacctggaactctggatctctgtcctctggggtgcacacattccctgctgtgctgcagtctgacctgtacaccctgagcagctctgtgactgtgaccagcagcacatggcccagccagagcatcacctgtaatgtggctcaccctgccagctccaccaaggtggacaagaagattgagcctagaggccccaccatcaagccctgtcctccatgcaagtgtcctgctcctaacctgcttggaggcccctctgtgttcatcttcccacctaagatcaaggatgtgctgatgatctctctgagccccattgtgacctgtgtggtggttgatgtgtctgaggatgaccctgatgtgcagatctcttggtttgtgaacaatgtggaagtgcacacagcccagacacagacccacagagaggactacaacagcaccctgagagtggtgtctgccctgcctatccagcaccaggactggatgtctggcaaagagttcaagtgcaaagtgaacaacaaggacctgcctgctccaattgagagaaccatctccaagcctaagggctctgtcagggcccctcaagtgtatgtgctgccacctcctgaggaagagatgaccaagaaacaagtgaccctgacatgcatggtcacagacttcatgcctgaggacatctatgtggaatggaccaacaatggcaagacagagctgaactacaagaacactgagcctgtgctggactctgatggctcctacttcatgtacagcaagctgagggttgagaagaagaactgggttgagagaaacagctacagctgctctgtggtgcatgagggcctgcacaatcaccacaccaccaagagcttcagcagaacccctggcaagagaaagagaagaggctctggagaaggcagaggctccctgctgacatgtggggatgttgaagagaatcctgggcctatgtataggatgcaactgctcctcctgattgctctgagcctggctcttgtgaccaactctgagattgtgatgacacagagccctggcacactgtctctgagccctggggaatctgccacactgagctgtagagccagccagtctgtgtctaccacctacctggcctggtatcagcagaagcctggacaggctcccagactgctgatctatggggcctcttctagagccacaggcatccctgacagattttctggcagtggctctggcacagacttcaccctgaccatcagcagactggaacctgaggactttgctgtgtactactgccagcagtatggtggcagcaggctgatcacatttggccagggcacaagactggaaatcaagagggctgatgctgcccctacagtgtctatcttcccacctagctctgagcagctgaccagtggtggtgcctctgttgtgtgcttcctgaacaacttctaccccaaggacatcaatgtgaagtggaagattgatggctctgagaggcagaatggggtgctgaacagctggacagaccaggacagcaaggactccacctacagcatgagcagcaccctgacactgaccaaggatgagtatgagaggcacaacagctacacctgtgaagccacacacaagaccagcacaagccccattgtgaagtccttcaacagaaatgagtgttaa

SEQ ID NO: 10 - DNA, 2214 bp, Artificial Sequence
  synthetic construct; transgene
atgtacagaatgcagctgctgctgctcattgccctgtctctggccctggtcaccaattctgaggtgcagctggtgcagtctggggctgaagtgaagaagcctggggagagcctgaagatcagctgcaaagtgtctggctatgacttcagcaagtactggattggctgggtcagacagatgcctggcaaaggcctggaatggatgggactgatctaccctggggactctgacaccagatacagccctagcctggaaggccaggtgtccatctctgctgacaagagcatctctgcagcctacctgcagttcagcagcctgaaggcctctgactctgccatgtactactgtgtcagaaagggctactctgcctaccttggaggatggtttgatccttggggccagggcacactggtcacagtgtcctctgctaagacaacagccccttctgtgtaccctctggctcctgtgtgtggggacacaacaggatcctctgtgacactgggctgcctggtcaagggatacttccctgagccagtgacactgacctggaactctggatctctgtcctctggggtgcacacattccctgctgtgctgcagtctgacctgtacaccctgagcagcagtgtgacagtgaccagcagcacatggcccagccagagcatcacctgtaatgtggctcaccctgccagctccaccaaggtggacaagaagattgagcctagaggccccaccatcaagccctgtcctccatgcaagtgtcctgctcctaacgctgccggaggcccctctgtgttcatcttcccacctaagatcaaggatgtgctgatgatctctctgagccccattgtgacctgtgtggtggtggatgtgtctgaggatgaccctgatgtgcagatctcttggtttgtgaacaatgtggaagtgcacacagcccagacacagacccacagagaggactacaacagcaccctgagagtggtgtctgccctgcctatccagcaccaggactggatgagtggcaaagagttcaagtgcaaagtgaacaacaaggacctgggcgctccaattgagagaaccatcagcaagcccaagggctctgttagagcccctcaagtgtatgtgctgcctccacctgaggaagagatgaccaagaaacaagtgaccctgacatgcatggtcacagacttcatgcctgaggacatctatgtggaatggaccaacaatggcaagacagagctgaactacaagaacactgagcctgtgctggactctgatggcagctacttcatgtacagcaagctgagggttgagaagaagaactgggttgagagaaacagctacagctgctctgtggtgcatgagggcctgcacaatcaccacaccaccaagagcttcagcagaacccctggcaagagaaagagaagaggctctggagaaggcagaggctccctgctgacatgtggggatgttgaagagaatcctgggcctatgtataggatgcaactgctcctcctgattgctctgagcctggctcttgtgaccaactctgacatccagctgacacagagccctgacagcctggctgcttctctgggagagagagtgaccatcaactgcagaagctcccagaacatcttctacaacagcaacaacaagaacttcctggcctggtatcagcagaaggctggccagtctcctaagctgctgatctactgggccagcaccagagaatctggggtgccagatagattttctggcagtggctctggcacagacttcaccctgacaatcagtggactgcaggctggggatgttgctgtgtacttctgccagcagtacttcacagatgcccctacctttggtggtggcaccaaggtggaaatcaagagggctgatgctgcccctacagtgtctatcttcccacctagctctgagcagctgaccagtggtggtgcctctgttgtgtgcttcctgaacaacttctaccccaaggacatcaatgtgaagtggaagattgatggctctgagaggcagaatggggtgctgaacagctggacagaccaggacagcaaggactccacctacagcatgagcagcacactgaccctgaccaaggatgagtatgagaggcacaacagctacacctgtgaagccacacacaagaccagcacaagccccattgtgaagtccttcaacagaaatgagtgttaa

SEQ ID NO: 11 - DNA, 2214 bp, Artificial Sequence
  synthetic construct; transgene
atgtacagaatgcagctgctgctgctcattgccctgtctctggccctggtcaccaattctgaggtgcagctgctgcagagtggtggtggtgttgtgcagcctggtggctctctgagactgtcttgtgaagcctctggcttcaccttcagcagctacagcatgcactgggtcagacaggcccctggcaaaggactggaatggctgaccctgatcagctacaatggggtcaacaagtactatgccaagtctgtgaagggcagatttgccatcagcagagatgacagcaagtctaccctgttcctgcagatgaacagcctgaccacagatgacactgctgtgtactactgtgccagatgtcccattcctagagctgccagctacagaaatggggacaactactttgagtttggccagggcaccctggtcacagtgtcctctgctaagacaacagccccttctgtgtaccctctggctcctgtgtgtggggacacaacaggatcctctgtgacactgggctgcctggtcaagggctactttcctgagccagtgacactgacctggaactctggatctctgtcctctggggtgcacacattccctgctgtgctgcagtctgacctgtacaccctgagcagcagtgtgacagtgaccagcagcacatggcccagccagagcatcacctgtaatgtggctcaccctgccagctccaccaaggtggacaagaagattgagcctagaggccccaccatcaagccctgtcctccatgcaagtgtcctgctcctaacgctgccggaggcccctctgtgttcatcttcccacctaagatcaaggatgtgctgatgatctctctgagccccattgtgacctgtgtggtggttgatgtgtctgaggatgacccagatgtgcagatctcttggtttgtgaacaatgtggaagtgcacacagcccagacacagacccacagagaggactacaacagcaccctgagagtggtgtctgccctgcctatccagcaccaggactggatgtctggcaaagagttcaagtgcaaagtgaacaacaaggacctgggagctccaattgagagaaccatcagcaagcccaagggctctgttagagcccctcaagtgtatgtgctgcctccacctgaggaagagatgaccaagaaacaagtgaccctgacatgcatggtcactgacttcatgcctgaggacatctatgtggaatggaccaacaatggcaagacagagctgaactacaagaacactgagcctgtgctggactctgatggcagctacttcatgtacagcaagctgagggttgagaagaagaactgggttgagagaaacagctactcctgctctgtggtgcatgagggcctgcacaaccatcacaccacaaagagcttcagcagaaccccaggcaagagaaagagaagaggctctggagaaggcagaggctccctgctgacatgtggggatgttgaagagaatcctgggcctatgtataggatgcaactgctcctcctgattgctctgagcctggctcttgtgaccaactctcaggctgtggtcacccaagagcctagcctgtctgtgtctcctggtggcacagtgacactgacatgtgccctgtcctctgcctctgtgtctaccagcagctaccccagctggtatcagcagacacctggccagcctccaagaatgctgatccacaacacagacaccagatcctctggggtgccagacagattctctggcagcatcctgggcaagaaggctgccctgacaatcactggtgcccaggctgatgatgagtctgactactactgtgtggtgtaccttggcaatggcttctgggtgtttggtggtggcaccaagctgacagtgctgggccagcctaaaagcagcccctctgtgacactgttccctccaagctctgaggaactggaaacaaacaaggccacacttgtgtgcaccatcacagacttctaccctggggttgtgacagtggactggaaagtggatggcacccctgtgacacaaggcatggaaaccacacagcccagcaagcagagcaacaacaagtacatggccagctcctatctgaccctgacagccagagcctgggagagacacagctcttacagctgccaagtgacccatgagggccacacagtggaaaagagcctgagcagagctgactgctcttaa

SEQ ID NO: 12 - DNA, 2184 bp, Artificial Sequence
  synthetic construct; transgene
atgtacagaatgcagctgctgctgctcattgccctgtctctggccctggtcaccaattctgaggtgcagctggtggaaagtggtggtggactggttcagcctggtggcagcctgagactgtcttgtgctgcctctggcttcaccttcagcatctacaccatgagctgggtcagacaggctcctggcaaaggcctggaatgggtgtcagctatcctgtctgatggcagcacctactatgctgactctgtggaaggcagattcaccatcagcagagacaacagcaagaccacactgtacctgcagatgaacagcctgacagctgaggacactgctgtgtactactgcaccaagagagtggaaggctccttcagaggctggggacagggaacactggtcactgtgtcctctgccaagacaactgccccttctgtgtaccctctggctcctgtgtgtggggacacaacaggatcctctgtgacactgggctgcctggtcaagggctactttcctgagccagtgacactgacctggaactctggatctctgtcctctggggtgcacacattccctgctgtgctgcagtctgacctgtacaccctgagcagctctgtgactgtgaccagcagcacatggcccagccagagcatcacctgtaatgtggctcaccctgccagctccaccaaggtggacaagaagattgagcctagaggccccaccatcaagccctgtcctccatgcaagtgtcctgctcctaacgccgctggaggcccctctgtgttcatcttcccacctaagatcaaggatgtgctgatgatctctctgagccccattgtgacctgtgtggtggttgatgtgtctgaggatgaccctgatgtgcagatctcttggtttgtgaacaatgtggaagtgcacacagcccagacacagacccacagagaggactacaacagcaccctgagagtggtgtctgccctgcctatccagcaccaggactggatgtctggcaaagagttcaagtgcaaagtgaacaacaaggacctgggagctccaattgagagaaccatctccaagcctaagggctctgtcagggcccctcaagtgtatgtgctgccacctcctgaggaagagatgaccaagaaacaagtgaccctgacatgcatggtcacagacttcatgcctgaggacatctatgtggaatggaccaacaatggcaagacagagctgaactacaagaacactgagcctgtgctggactctgatggctcctacttcatgtacagcaagctgagggttgagaagaagaactgggttgagagaaacagctacagctgctctgtggtgcatgagggcctgcacaatcaccacaccaccaagagcttcagcagaacccctggcaagagaaagagaagaggctctggagaaggcagaggctccctgctgacatgtggggatgttgaagagaatcctgggcctatgtataggatgcaactgctcctcctgattgctctgagcctggctcttgtgaccaactctgagattgtgatgacacagagccctggcacactgtctctgagccctggggaatctgccacactgagctgtagagccagccagtctgtgtctaccacctacctggcctggtatcagcagaagcctggacaggctcccagactgctgatctatggggcctcttctagagccacaggcatccctgacagattttctggcagtggctctggcacagacttcaccctgaccatcagcagactggaacctgaggactttgctgtgtactactgccagcagtatggtggcagcaggctgatcacatttggccagggcacaagactggaaatcaagagggctgatgctgcccctacagtgtctatcttcccacctagctctgagcagctgaccagtggtggtgcctctgttgtgtgcttcctgaacaacttctaccccaaggacatcaatgtgaagtggaagattgatggctctgagaggcagaatggggtgctgaacagctggacagaccaggacagcaaggactccacctacagcatgagcagcaccctgacactgaccaaggatgagtatgagaggcacaacagctacacctgtgaagccacacacaagaccagcacaagccccattgtgaagtccttcaacagaaatgagtgttaa

SEQ ID NO: 13 - DNA, 2214 bp, Artificial Sequence
  synthetic construct; transgene
atgtacagaatgcagctgctgctgctcattgccctgtctctggccctggtcaccaattctgaagtgcagctggtgcagtctggggctgaagtgaagaagcctggggagagcctgaagatcagctgcaaagtgtctggctatgacttcagcaagtactggattggctgggtcagacagatgcctggcaaaggcctggaatggatgggcctgatctaccctggggactctgacaccagatacagccctagcctggaaggccaggtgtccatctctgctgacaagagcatctctgcagcctacctgcagttcagcagcctgaaggcctctgactctgccatgtactactgtgtcagaaagggctactctgcctaccttggaggatggtttgatccttggggccagggcacactggttacagtgtcctctgccagcacaaagggcccctctgtttttccactggctcccagcagcaagtccaccagtggtggtacagctgccctgggctgtctggtcaaggattacttccctgagcctgtgactgtgtcctggaactctggtgctctgacctctggggtgcacacctttccagctgtgctgcagtcctctggcctgtactctctgtcctctgtggtcacagtgcctagctctagcctgggcacccagacctacatctgcaatgtgaaccacaagcctagcaacaccaaggtggacaagagagtggaacccaagagctgtgacaagacccacacctgtcctccatgtcctgctccagaactgcttggaggcccttctgtgttcctgtttcctccaaagcctaaggacaccctgatgatcagcagaacccctgaagtgacctgtgtggtggtggatgtgtcccatgaggacccagaagtgaagttcaattggtatgtggatggggttgaagtgcacaatgccaagaccaagcctagagaggaacagtacaacagcacctacagagtggtgtctgtgctgacagtgctgcaccaggactggctgaatggcaaagagtacaagtgcaaggtgtccaacaaggccctgcctgctcctattgagaaaaccatcagcaaggccaagggccagccaagagaaccccaggtttacaccctgccacctagcagagaagagatgaccaagaatcaggtgtccctgacctgcctggttaagggcttctacccctctgacattgctgtggaatgggagagcaatggccagcctgagaacaactacaagacaacccctcctgtgctggactctgatggctcattcttcctgtacagcaagctgactgtggacaagtccagatggcagcagggaaatgtgttcagctgctctgtgatgcatgaggccctgcacaaccactacacccagaaaagtctgtctctgtcccctggcaagagaaagagaagaggctctggagaaggcagaggctccctgctgacatgtggggatgttgaagagaatcctgggcctatgtataggatgcaactgctcctcctgattgctctgagcctggctcttgtgaccaactctgatatccagctgacacagagccctgacagcctggctgcttctctgggagagagagtgaccatcaactgcagaagctcccagaacatcttctacaactccaacaacaagaacttcctggcctggtatcagcaaaaggctggacagagccccaagctgctgatctactgggcctctaccagagagtctggggtcccagacagattctctggctctggatctggcacagacttcaccctgaccatcagtggactgcaggctggggatgttgctgtgtacttctgccagcagtacttcacagatgcccctacctttggtggtggcacaaaggtggaaatcaagagaacagtggctgccccatctgtgttcatcttcccaccatctgatgaacagctgaagtctggcactgcctctgttgtgtgcctgctgaacaacttctaccctagagaagccaaggtgcagtggaaagtggataatgccctccagtctggcaatagccaagagtcagtgacagagcaggactccaaggattccacctacagcctgagcagcaccctgacactgagcaaggctgactatgagaagcacaaagtgtatgcctgtgaagtgacacaccagggactgagcagcccagtgaccaagagcttcaacaggggagagtgctga

SEQ ID NO: 14 - DNA, 2214 bp, Artificial Sequence
  synthetic construct; transgene
atgtacaggatgcagctgctgctgctcattgccctgtctctggccctggtcaccaattctgaagtgcagcttctgcagtctggtggtggtgttgtgcagcctggtggctctctgagactgtcttgtgaagcctctggcttcaccttcagcagctacagcatgcactgggttagacaggcccctggcaaaggcctggaatggctgaccctgatcagctacaatggggtcaacaagtactatgccaagtctgtgaagggcagatttgccatcagcagagatgacagcaagagcaccctgtttctgcagatgaacagcctgaccacagatgacacagcagtgtactactgtgccagatgtcccattcctagagctgccagctacagaaatggggacaactactttgagtttggccagggcacactggtcacagtgtcctctgcctctacaaagggcccctctgtgtttcctctggctcctagcagcaagtccaccagtggtggtacagctgccctgggctgtctggtcaaggattacttccctgagcctgtgactgtgtcctggaattctggggctctgacctctggggtgcacacctttccagctgtgctgcagtcctctggcctgtactctctgtcctctgtggttacagtgccaagcagctctctgggcacccagacctacatctgcaatgtgaaccacaagcctagcaacaccaaggtggacaagagagtggaacccaagagctgtgacaagacccacacctgtcctccatgtcctgctccagaactgcttggaggcccatcagtgtttctgttccctccaaagcctaaggacaccctgatgatcagcagaacccctgaagtgacctgtgtggtggtggatgtgtcccatgaggacccagaagtgaagttcaattggtatgtggatggggttgaagtgcacaatgccaagaccaagcctagagaggaacagtacaacagcacctacagagtggtgtctgtgctgacagtgctgcaccaggactggctgaatggcaaagagtacaagtgcaaggtgtccaacaaggccctgcctgctcctattgagaaaaccatcagcaaggccaagggccagccaagagaaccccaggtttacaccctgccacctagcagagaagagatgaccaagaaccaggtgtccctgacctgcctggttaagggcttctacccctctgacattgctgtggaatgggagagcaatggccagcctgagaacaactacaagacaacccctcctgtgctggactctgatggctcattcttcctgtacagcaagctgactgtggacaagtccagatggcagcagggaaatgtgttcagctgctctgtgatgcatgaggccctgcacaaccactacacccagaaaagtctgagtctgagccctggcaagagaaagagaagaggctctggagaaggcagaggcagcctgctgacatgtggggatgttgaagagaatcctgggcctatgtatagaatgcaactgctcctcctgattgctctgagcctggctctggttaccaacagccaggctgtggtcacacaagagcccagcctgtctgtgtctcctggtggaacagtgaccctgacttgtgccctctcttctgcctctgtgtccacaagcagctaccccagctggtatcagcagacacctggccagccacctagaatgctgatccacaacactgacaccagaagctctggggtcccagacagattctctggcagcatcctgggaaagaaggctgccctgacaatcactggtgcccaggctgatgatgagtctgactactattgtgtggtgtaccttggcaatggcttttgggtgttcggtggtggcaccaaactgactgtgctgggacagcctaaagctgccccttctgtgacactgttcccacctagctctgaggaactgcaggccaacaaagccacacttgtgtgcctgatctctgacttctaccctggggctgtgacagtggcttggaaggctgatagcagccctgtgaaggctggggttgagacaaccacacctagcaagcagagcaacaacaaatatgctgcctccagctatctgtctctgacccctgagcagtggaagtcccacagatcctacagctgtcaagtgacccatgagggctccacagtggaaaagacagtggccccaacagagtgcagctga

SEQ ID NO: 15 - DNA, 2184 bp, Artificial Sequence
  synthetic construct; transgene
atgtacagaatgcagctgctgctgctcattgccctgtctctggccctggtcaccaattctgaagtgcagctggtggaaagtggtggtggactggttcagcctggtggcagcctgagactgtcttgtgctgcctctggcttcaccttcagcatctacaccatgagctgggtcagacaggcccctggcaaaggactggaatgggtgtcagccatcctgtctgatggcagcacctactatgctgactctgtggaaggcagattcaccatcagcagagacaacagcaagaccacactgtacctgcagatgaacagcctgacagctgaggacacagcagtgtactactgcaccaagagagtggaaggctccttcagaggctggggccagggaacactggttacagtgtcctctgccagcacaaagggcccctctgtttttccactggctcccagcagcaagagcaccagtggtggaacagctgccctgggctgtctggtcaaggattacttccctgagcctgtgactgtgtcctggaactctggtgcactgacctctggggtgcacacctttccagctgtgctgcagtcctctggcctgtactctctgtcctctgtggtcacagtgcctagctctagcctgggcacccagacctacatctgcaatgtgaaccacaagcctagcaacaccaaggtggacaaaagagtggaacccaagagctgtgacaagacccacacctgtcctccatgtcctgctccagaactgcttggaggcccttctgtgttcctgtttcctccaaagcctaaggacaccctgatgatcagcagaacccctgaagtgacctgtgtggtggttgatgtgtcccatgaggacccagaagtgaagttcaattggtatgtggatggggttgaagtgcacaatgccaagaccaagcctagagaggaacagtacaactccacctacagagtggtgtctgtgctgacagtgctgcaccaggactggctgaatggcaaagagtacaagtgcaaggtgtccaacaaggccctgcctgctcctattgagaaaaccatctccaaggccaagggccagccaagagaaccccaggtttacaccctgccacctagcagagaagagatgaccaagaaccaggtgtccctgacctgcctggttaagggcttctacccctctgacattgctgtggaatgggagagcaatggccagcctgaaaacaactacaagacaacccctcctgtgctggactcagatggctcattcttcctgtacagcaagctgactgtggacaagtccaggtggcagcagggaaatgtgttcagctgctctgtgatgcatgaggccctgcacaaccactacacccagaaaagtctgagtctgagccctggcaagagaaagagaagaggctctggagaaggcagaggctccctgctgacatgtggggatgttgaagagaatcctgggcctatgtataggatgcaactgctcctcctgattgctctgagcctggctcttgtgaccaactctgagattgtgatgacacagagcccaggcacactgtcactgtctccaggggaatctgccactctgagctgtagagccagccagtctgtgtctaccacctacctggcctggtatcagcaaaagcctggacaggctcccagactgctgatctatggggcctcttctagagccacaggcatccctgacagattttctggcagtggctctggcacagacttcaccctgaccatctctagactggaacctgaggactttgctgtctactactgccagcagtatggtggctccagactgatcacctttggccagggcaccagactggaaatcaagagaacagtggctgccccatctgtgttcatcttcccaccatctgatgagcagctcaagtctggcactgcctctgttgtgtgcctgctgaacaacttctaccctagagaagccaaggtgcagtggaaggttgacaatgccctgcagtctggcaatagccaagaatctgtgacagagcaggactccaaggatagcacctacagcctgtctagcaccctgacactgagcaaggctgactatgagaagcacaaagtgtatgcctgtgaagtgacacaccagggcctgagcagcccagtgaccaagagcttcaatagaggggagtgctga

SEQ ID NO: 16 - DNA, 1725 bp, Artificial Sequence
  synthetic construct; linker construct
gacattgattattgactagttattaatagtaatcaattacggggtcattagttcatagcccatatatggagttccgcgttacataacttacggtaaatggcccgcctggctgaccgcccaacgacccccgcccattgacgtcaataatgacgtatgttcccatagtaacgccaatagggactttccattgacgtcaatgggtggagtatttacggtaaactgcccacttggcagtacatcaagtgtatcatatgccaagtacgccccctattgacgtcaatgacggtaaatggcccgcctggcattatgcccagtacatgaccttatgggactttcctacttggcagtacatctacgtattagtcatcgctattaccatggtcgaggtgagccccacgttctgcttcactctccccatctcccccccctccccacccccaattttgtatttatttattttttaattattttgtgcagcgatgggggcggggggggggggggggcgcgcgccaggcggggcggggcggggcgaggggcggggcggggcgaggcggagaggtgcggcggcagccaatcagagcggcgcgctccgaaagtttccttttatggcgaggcggcggcggcggcggccctataaaaagcgaagcgcgcggcgggcgggagtcgctgcgcgctgccttcgccccgtgccccgctccgccgccgcctcgcgccgcccgccccggctctgactgaccgcgttactcccacaggtgagcgggcgggacggcccttctcctccgggctgtaattagcgcttggtttaatgacggcttgtttcttttctgtggctgcgtgaaagccttgaggggctccgggagggccctttgtgcggggggagcggctcggggggtgcgtgcgtgtgtgtgtgcgtggggagcgccgcgtgcggctccgcgctgcccggcggctgtgagcgctgcgggcgcggcgcggggctttgtgcgctccgcagtgtgcgcgaggggagcgcggccgggggcggtgccccgcggtgcggggggggctgcgaggggaacaaaggctgcgtgcggggtgtgtgcgtgggggggtgagcagggggtgtgggcgcgtcggtcgggctgcaaccccccctgcacccccctccccgagttgctgagcacggcccggcttcgggtgcggggctccgtacggggcgtggcgcggggctcgccgtgccgggcggggggtggcggcaggtgggggtgccgggcggggcggggccgcctcgggccggggagggctcgggggaggggcgcggcggcccccggagcgccggcggctgtcgaggcgcggcgagccgcagccattgccttttatggtaatcgtgcgagagggcgcagggacttcctttgtcccaaatctgtgcggagccgaaatctgggaggcgccgccgcaccccctctagcgggcgcggggcgaagcggtgcggcgccggcaggaaggaaatgggcggggagggccttcgtgcgtcgccgcgccgccgtccccttctccctctccagcctcggggctgtccgcggggggacggctgccttcgggggggacggggcagggcggggttcggcttctggcgtgtgaccggcggctctagagcctctgctaaccatgttcatgccttcttctttttcctacagctcctgggcaacgtgctggttattgtgctgtctcatcattttggcaaag

SEQ ID NO: 17 - DNA, 380 bp, Artificial Sequence
  synthetic construct; enhancer construct
gacattgattattgactagttattaatagtaatcaattacggggtcattagttcatagcccatatatggagttccgcgttacataacttacggtaaatggcccgcctggctgaccgcccaacgacccccgcccattgacgtcaataatgacgtatgttcccatagtaacgccaatagggactttccattgacgtcaatgggtggagtatttacggtaaactgcccacttggcagtacatcaagtgtatcatatgccaagtacgccccctattgacgtcaatgacggtaaatggcccgcctggcattatgcccagtacatgaccttatgggactttcctacttggcagtacatctacgtattagtcatcgctattaccatg

SEQ ID NO: 18 - DNA, 133 bp, Artificial Sequence
  synthetic construct; chimeric intron
gtaagtatcaaggttacaagacaggtttaaggagaccaatagaaactgggcttgtcgagacagagaagactcttgcgtttctgataggcacctattggtcttactgacatccactttgcctttctctccacag

SEQ ID NO: 19 - DNA, 594 bp, Artificial Sequence
  synthetic construct; promoter sequence
cgcgtggtacctctggtcgttacataacttacggtaaatggcccgcctggctgaccgcccaacgaccccgcccattgacgtcaataatgacgtatgttcccatagtaacgccaatagggactttccattgacgtcaatgggtggagtatttacggtaaactgcccacttggcagtacatcaagtgtatcatatgccaagtacgccccctattgacgtcaatgacggtaaatggcccgcctggcattatgcccagtacatgaccttatgggactttcctacttggcagtacatctactcgaggccacgttctgcttcactctccccatctcccccccctccccacccccaattttgtatttatttattttttaattattttgtgcagcgatgggggcggggggggggggggggggggcgcgcgccaggcggggcggggcggggcgaggggcggggcggggcgaggcggagaggtgcggcggcagccaatcagagcggcgcgctccgaaagtttccttttatggcgaggcggcggcggcggcggccctataaaaagcgaagcgcgcggcgggcgggagcgggatcagccaccgcgg

SEQ ID NO: 20 - DNA, 909 bp, Artificial Sequence
  synthetic construct; promoter construct
tatataaggacgcgccgggtgtggcacagctagttccgtcgcagccgggatttgggtcgcagttcttgtttgtggatcgctgtgatcgtcacttggtgagtagcgggctgctgggctggccggggctttcgtggccgccgggccgctcggtgggacggaggcgtgtggagagaccgccaagggctgtagtctgggtccgcgagcaaggttgccctgaactgggggttggggggagcgcagcaaaatggcggctgttcccgagtcttgaatggaagacgcttgtgaggcgggctgtgaggtcgttgaaacaaggtggggggcatggtgggcggcaagaacccaaggtcttgaggccttcgctaatgcgggaaagctcttattcgggtgagatgggctggggcaccatctggggaccctgacgtgaagtttgtcactgactggagaactcggtttgtcgtctgttgcgggggcggcagttatggcggtgccgttgggcagtgcacccgtacctttgggagcgcgcgccctcgtcgtgtcgtgacgtcacccgttctgttggcttataatgcagggtggggccacctgccggtaggtgtgcggtaggcttttctccgtcgcaggacgcagggttcgggcctagggtaggctctcctgaatcgacaggcgccggacctctggtgaggggagggataagtgaggcgtcagtttctctggtcggttttatgtacctatcttcttaagtagctgaagctccggttttgaactatgcgctcggggttggcgagtgtgttttgtgaagttttttaggcaccttttgaaatgtaatcatttgggtcaatatgtaattttcagtgttagactagtaaattgtccgctaaattctggccgtttttggcttttttgttagac

SEQ ID NO: 21 - DNA, 303 bp, Artificial Sequence
  synthetic construct; enhancer sequence
ggcctccgcgccgggttttggcgcctcccgcgggcgcccccctcctcacggcgagcgctgccacgtcagacgaagggcgcagcgagcgtcctgatccttccgcccggacgctcaggacagcggcccgctgctcataagactcggccttagaaccccagtatcagcagaaggacattttaggacgggacttgggtgactctagggcactggttttctttccagagagcggaacaggcgaggaaaagtagtcccttctcggcgattctgcggagggatctccgtggggcggtgaacgccgatgat

SEQ ID NO: 22 - DNA, 448 bp, Artificial Sequence
  synthetic construct; promoter sequence
agtgcaagtgggttttaggaccaggatgaggcggggtgggggtgcctacctgacgaccgaccccgacccactggacaagcacccaacccccattccccaaattgcgcatcccctatcagagagggggaggggaaacaggatgcggcgaggcgcgtgcgcactgccagcttcagcaccgcggacagtgccttcgcccccgcctggcggcgcgcgccaccgccgcctcagcactgaaggcgcgctgacgtcactcgccggtcccccgcaaactccccttcccggccaccttggtcgcgtccgcgccgccgccggcccagccggaccgcaccacgcgaggcgcgagataggggggcacgggcgcgaccatctgcgctgcggcgccggcgactcagcgctgcctcagtctgcggtgggcagcggaggagtcgtgtcgtgcctgagagcgcag

SEQ ID NO: 23 - DNA, 429 bp, Artificial Sequence
  synthetic construct; promoter sequence
ctgcagagggccctgcgtatgagtgcaagtgggttttaggaccaggatgaggcggggtgggggtgcctacctgacgaccgaccccgacccactggacaagcacccaacccccattccccaaattgcgcatcccctatcagagagggggaggggaaacaggatgcggcgaggcgcgtgcgcactgccagcttcagcaccgcggacagtgccttcgcccccgcctggcggcgcgcgccaccgccgcctcagcactgaaggcgcgctgacgtcactcgccggtcccccgcaaactccccttcccggccaccttggtcgcgtccgcgccgccgccggcccagccggaccgcaccacgcgaggcgcgagataggggggcacgggcgcgaccatctgcgctgcggcgccggcgactcagcgctgcctcagtctgc

SEQ ID NO: 24 - DNA, 477 bp, Artificial Sequence
  synthetic construct; promoter sequence
ctgcagagggccctgcgtatgagtgcaagtgggttttaggaccaggatgaggcggggtgggggtgcctacctgacgaccgaccccgacccactggacaagcacccaacccccattccccaaattgcgcatcccctatcagagagggggaggggaaacaggatgcggcgaggcgcgtgcgcactgccagcttcagcaccgcggacagtgccttcgcccccgcctggcggcgcgcgccaccgccgcctcagcactgaaggcgcgctgacgtcactcgccggtcccccgcaaactccccttcccggccaccttggtcgcgtccgcgccgccgccggcccagccggaccgcaccacgcgaggcgcgagataggggggcacgggcgcgaccatctgcgctgcggcgccggcgactcagcgctgcctcagtctgcggtgggcagcggaggagtcgtgtcgtgcctgagagcgcagggcgcgcc

SEQ ID NO: 25 - DNA, 469 bp, Artificial Sequence
  synthetic construct; promoter sequence
ctgcagagggccctgcgtatgagtgcaagtgggttttaggaccaggatgaggcggggtgggggtgcctacctgacgaccgaccccgacccactggacaagcacccaacccccattccccaaattgcgcatcccctatcagagagggggaggggaaacaggatgcggcgaggcgcgtgcgcactgccagcttcagcaccgcggacagtgccttcgcccccgcctggcggcgcgcgccaccgccgcctcagcactgaaggcgcgctgacgtcactcgccggtcccccgcaaactccccttcccggccaccttggtcgcgtccgcgccgccgccggcccagccggaccgcaccacgcgaggcgcgagataggggggcacgggcgcgaccatctgcgctgcggcgccggcgactcagcgctgcctcagtctgccaattgcagcggaggagtcgtgtcgtgcctgagagcgcag

SEQ ID NO: 26 - DNA, 571 bp, Artificial Sequence
  synthetic construct; promoter sequence
cctgcagggcccactagtatctgcagagggccctgcgtatgagtgcaagtgggttttaggaccaggatgaggcggggtgggggtgcctacctgacgaccgaccccgacccactggacaagcacccaacccccattccccaaattgcgcatcccctatcagagagggggaggggaaacaggatgcggcgaggcgcgtgcgcactgccagcttcagcaccgcggacagtgccttcgcccccgcctggcggcgcgcgccaccgccgcctcagcactgaaggcgcgctgacgtcactcgccggtcccccgcaaactccccttcccggccaccttggtcgcgtccgcgccgccgccggcccagccggaccgcaccacgcgaggcgcgagataggggggcacgggcgcgaccatctgcgctgcggcgccggcgactcagcgctgcctcagtctgcggtgggcagcggaggagtcgtgtcgtgcctgagagcgcagctgtgctcctgggcaccgcgcagtccgcccccgcggctcctggccagaccacccctaggaccccctgccccaagtcgcagcc

SEQ ID NO: 27 - DNA, 229 bp, Artificial Sequence
  synthetic construct; promoter sequence
agctgaatggggtccgcctcttttccctgcctaaacagacaggaactcctgccaattgagggcgtcaccgctaaggctccgccccagcctgggctccacaaccaatgaagggtaatctcgacaaagagcaaggggtggggcgcgggcgcgcaggtgcagcagcacacaggctggtcgggagggcggggcgcgacgtctgccgtgcggggtcccggcatcggttgcgcgc

SEQ ID NO: 28 - DNA, 1675 bp, Artificial Sequence
  synthetic construct; promoter sequence
gtctgcaagcagacctggcagcattgggctggccgccccccagggcctcctcttcatgcccagtgaatgactcaccttggcacagacacaatgttcggggtgggcacagtgcctgcttcccgccgcaccccagcccccctcaaatgccttccgagaagcccattgagtagggggcttgcattgcaccccagcctgacagcctggcatcttgggataaaagcagcacagccccctaggggctgcccttgctgtgtggcgccaccggcggtggagaacaaggctctattcagcctgtgcccaggaaaggggatcaggggatgcccaggcatggacagtgggtggcagggggggagaggagggctgtctgcttcccagaagtccaaggacacaaatgggtgaggggactgggcagggttctgaccctgtgggaccagagtggagggcgtagatggacctgaagtctccagggacaacagggcccaggtctcaggctcctagttgggcccagtggctccagcgtttccaaacccatccatccccagaggttcttcccatctctccaggctgatgtgtgggaactcgaggaaataaatctccagtgggagacggaggggtggccagggaaacggggcgctgcaggaataaagacgagccagcacagccagctcatgcgtaacggctttgtggagctgtcaaggcctggtctctgggagagaggcacagggaggccagacaaggaaggggtgacctggagggacagatccaggggctaaagtcctgataaggcaagagagtgccggccccctcttgccctatcaggacctccactgccacatagaggccatgattgacccttagacaaagggctggtgtccaatcccagcccccagccccagaactccagggaatgaatgggcagagagcaggaatgtgggacatctgtgttcaagggaaggactccaggagtctgctgggaatgaggcctagtaggaaatgaggtggcccttgagggtacagaacaggttcattcttcgccaaattcccagcaccttgcaggcacttacagctgagtgagataatgcctgggttatgaaatcaaaaagttggaaagcaggtcagaggtcatctggtacagcccttccttcccttttttttttttttttttttttgtgagacaaggtctctctctgttgcccaggctggagtggcgcaaacacagctcactgcagcctcaacctactgggctcaagcaatcctccagcctcagcctcccaaagtgctgggattacaagcatgagccaccccactcagccctttccttcctttttaattgatgcataataattgtaagtattcatcatggtccaaccaaccctttcttgacccaccttcctagagagagggtcctcttgattcagcggtcagggccccagacccatggtctggctccaggtaccacctgcctcatgcaggagttggcgtgcccaggaagctctgcctctgggcacagtgacctcagtggggtgaggggagctctccccatagctgggctgcggcccaaccccaccccctcaggctatgccagggggtgttgccaggggcacccgggcatcgccagtctagcccactccttcataaagccctcgcatcccaggagcgagcagagccagagcat

SEQ ID NO: 29 - DNA, 2043 bp, Artificial Sequence
  synthetic construct; promoter sequence
agctctgagctcctcctctgctcgcccaatccttccaaccccctatggtggtatggctgacacagaaaatgtctgctcctgtatgggacatttgcccctcttctccaaatataagacaggatgaggcctagcttttgctgctccaaagttttaaaagaacacattgcacggcatttagggactctaaagggtggaggaggaatgagggaattgcatcatgccaaggctggtcctcatccatcactgcttccagggcccagagtggcttccaggaagtattcttacaaaggaagcccgatctgtagctaacactcagagcccattttcctgcgttaacccctcccgacctcatatacaggagtaacatgatcagtgacctgggggagctggccaaactgcgggacctgcccaagctgagggccttggtgctgctggacaacccctgtgccgatgagactgactaccgccaggaggccctggtgcagatggcacacctagagcgcctagacaaagagtactatgaggacgaggaccgggcagaagctgaggagatccgacagaggctgaaggaggaacaggagcaagaactcgacccggaccaagacatggaaccgtacctcccgccaacttagtggctcctctagcctgcagggacagtaaaggtgatggcaggaaggcagcccccggaggtcaaaggctgggcacgcgggaggagaggccagagtcagaggctgcgggtatctcagatatgaaggaaagatgagagaggctcaggaagaggtaagaaaagacacaagagaccagagaagggagaagaattagagagggaggcagaggaccgctgtctctacagacatagctggtagagactgggaggaagggatgaaccctgagcgcatgaagggaaggaggtggctggtggtatatggaggatgtagctgggccagggaaaagatcctgcactaaaaatctgaagctaaaaataacaggacacggggtggagaggcgaaaggagggcagagtgaggcagagagactgagaggcctggggatgtgggcattccggtagggcacacagttcacttgtcttctctttttccaggaggccaaagatgctgacgtcaagaactcataataccccagtggggaccaccgcattcatagccctgttacaagaagtgggagatgttcctttttgtcccagactggaaatccgttacatcccgaggctcaggttctgtggtggtcatctctgtgtggcttgttctgtgggcctacctaaagtcctaagcacagctctcaagcagatccgaggcgactaagatgctagtaggggttgtctggagagaagagccgaggaggtgggctgtgatggatcagttcagctttcaaataaaaaggcgtttttatattctgtgtcgagttcgtgaacccctgtggtgggcttctccatctgtctgggttagtacctgccactatactggaataaggggacgcctgcttccctcgagttggctggacaaggttatgagcatccgtgtacttatggggttgccagcttggtcctggatcgcccgggcccttcccccacccgttcggttccccaccaccacccgcgctcgtacgtgcgtctccgcctgcagctcttgactcatcggggcccccgggtcacatgcgctcgctcggctctataggcgccgccccctgcccaccccccgcccgcgctgggagccgcagccgccgccactcctgctctctctgcgccgaagcttcgaggggctcgcatctctccttcacgcgcccgccgccctacctgaggccgccatccacgccggttgagtcgcgttctgccgcctcccgcctgtggtgcctcctgaactgcgtccgccgtctaggtaagtttaaagctcaggtcgagaccgggcctttgtccggcgctcccttggagcctacctagactcagccggctctccacgctttgcctgaccctgcttgctcaactctacgtctttgtttcgttttctgttctgcgccgttacagatc

SEQ ID NO: 30 - DNA, 60 bp, Artificial Sequence
  synthetic construct; promoter sequence
gaggaggaggagagagaccgggagggcgcccgggaggcagggcgcgcgcacactccgagg

SEQ ID NO: 31 - DNA, 60 bp, Artificial Sequence
  synthetic construct; promoter sequence
gatgctgacgaaggctcgcgaggctgtgagcagccacagtgccctgctcagaagccccgg

SEQ ID NO: 32 - DNA, 364 bp, Artificial Sequence
  synthetic construct; promoter sequence
acttgtggactaagtttgttcgcatccccttctccaaccccctcagtacatcaccctgggggaacagggtccacttgctcctgggcccacacagtcctgcagtattgtgtatataaggccagggcaaagaggagcaggttttaaagtgaaaggcaggcaggtgttggggaggcagttaccggggcaacgggaacagggcgtttcggaggtggttgccatggggacctggatgctgacgaaggctcgcgaggctgtgagcagccacagtgccctgctcagaagccccaagctcgtcagtcaagccggttctccgtttgcactcaggagcacgggcaggcgagtggcccctagttctgggggcagc

SEQ ID NO: 33 - DNA, 60 bp, Artificial Sequence
  synthetic construct; promoter sequence
gtctcccgcgcccgcgcccgtgtcgccgccgtgcccgcgagcgggagccggagtcgccgc

SEQ ID NO: 34 - DNA, 60 bp, Artificial Sequence
  synthetic construct; promoter sequence
cgtgtgcagatgcagggcgccggtgccctgcgggtgcgggtgcaggagcagcgtgtgcag

SEQ ID NO: 35 - DNA, 60 bp, Artificial Sequence
  synthetic construct; promoter sequence
ccccacgccaccctttctggtcatctcccctcccgccccgcccctgcgcacactccctcg

SEQ ID NO: 36 - DNA, 60 bp, Artificial Sequence
  synthetic construct; promoter sequence
tctccccggtaaagtctcgcggtgctgccgggctcagccccgtctcctcctcttgctccc

SEQ ID NO: 37 - DNA, 60 bp, Artificial Sequence
  synthetic construct; promoter sequence
cgcctcctccgcccgccgcccgggagccgcagccgccgccgccactgccactcccgctct

SEQ ID NO: 38 - DNA, 60 bp, Artificial Sequence
  synthetic construct; promoter sequence
tgggtgcccccacccttcccccatcctcctcccttccccactccaccctcgtcggtcccc

SEQ ID NO: 39 - DNA, 60 bp, Artificial Sequence
  synthetic construct; promoter sequence
aaaaaaaaaaaaaaagcccaccctccagcctcgctgcaaagagaaaaccggagcagccgc

SEQ ID NO: 40 - DNA, 60 bp, Artificial Sequence
  synthetic construct; promoter sequence
tctcgcactctcccttctcctttataaaggccggaacagctgaaagggtggcaacttctc

SEQ ID NO: 41 - DNA, 60 bp, Artificial Sequence
  synthetic construct; promoter sequence
gccgcgtccacctgtcggccgggcccagccgagcgcgcagcgggcacgccgcgcgcgcgg

SEQ ID NO: 42 - DNA, 60 bp, Artificial Sequence
  synthetic construct; promoter sequence
gcgccccgcccccggcgctgagtcctgtgacagcccccgggccgcctgcacttgcagcct

SEQ ID NO: 43 - DNA, 60 bp, Artificial Sequence
  synthetic construct; promoter sequence
aaagaagagtcccctattcctgaaacttactctgtccgtggtgctgaaacattgtaccga

SEQ ID NO: 44 - DNA, 60 bp, Artificial Sequence
  Synthetic construct; promoter sequence
cgtcctcaaagagcagcaagccttctccatcttaatttgactctaccgcagagcagactt

SEQ ID NO: 45 - DNA, 60 bp, Artificial Sequence
  Synthetic construct; promoter sequence
atgcagctattctgttgtattctcattctcactctccctcccttctctcactctcactct

SEQ ID NO: 46 - DNA, 60 bp, Artificial Sequence
  Synthetic construct; promoter sequence
catgttagcgtccccagctgcagcccagggagggagagaggctgcgctcagtctgagagt

SEQ ID NO: 47 - DNA, 60 bp, Artificial Sequence
  Synthetic construct; promoter sequence
tgacgtcagagagagagtttaaaacagagggagacggttgagagcacacaagccgcttta

SEQ ID NO: 48 - DNA, 60 bp, Artificial Sequence
  Synthetic construct; promoter sequence
gagtgaaaataaaagattgtataaatcgtggggcatgtggaattgtgtgtgcctgtgcgt

SEQ ID NO: 49 - DNA, 60 bp, Artificial Sequence
  Synthetic construct; promoter sequence
gccgcggcgaggaagctccataaaagccctgtcgcgacccgctctctgcaccccatccgc

SEQ ID NO: 50 - DNA, 60 bp, Artificial Sequence
  Synthetic construct; promoter sequence
cagtcctaagtataagccctataaaatgatgggctttgaaatgctggtcagggtagagtg

SEQ ID NO: 51 - DNA, 60 bp, Artificial Sequence
  Synthetic construct; promoter sequence
ttttccattaatgttttcagactgctgttgaccacaggtaactgaaatcatggaaagaga

SEQ ID NO: 52 - DNA, 60 bp, Artificial Sequence
  synthetic construct; promoter sequence
tggtcatatgagcagaaatgatgagaaaagcactttttaatcttttcgcacttgctctgc

SEQ ID NO: 53 - DNA, 60 bp, Artificial Sequence
  Synthetic construct; promoter sequence
aatagccagagcagaagcctatataggtggccatcccacctccaggctcacttcccgaca

SEQ ID NO: 54 - DNA, 60 bp, Artificial Sequence
  Synthetic construct; promoter sequence
cagcgctcagattttgcagcataaatttgcatccaggacagaccagagcagaggctgagg

SEQ ID NO: 55 - DNA, 60 bp, Artificial Sequence
  Synthetic construct; promoter sequence
gcacgcacgcgcgcgcagggccaagcccgaggcagctcgcccgcagctcgcactcgcagg

SEQ ID NO: 56 - DNA, 60 bp, Artificial Sequence
  Synthetic construct; promoter sequence
cccgcctctggctcgcccgaggacgcgctggcacgcctcccaccccctcactctgactcc

SEQ ID NO: 57 - DNA, 60 bp, Artificial Sequence
  Synthetic construct; promoter sequence
cactgggctccctttccctcaaatgctctggggctctccgcgctttcctgagtccgggct

SEQ ID NO: 58 - DNA, 60 bp, Artificial Sequence
  Synthetic construct; promoter sequence
cacagaaaactcctctgggccacgcttcccgcctcgccgaggtctccccagtctgcccct

SEQ ID NO: 59 - DNA, 60 bp, Artificial Sequence
  Synthetic construct; promoter sequence
ctctgcccccgcctaccccggagccgtgcagccgcctctccgaatctctctcttctcctg

SEQ ID NO: 60 - DNA, 60 bp, Artificial Sequence
  Synthetic construct; promoter sequence
ctggatttataatcgccctataaagctccagaggcggtcaggcacctgcagaggagcccc

SEQ ID NO: 61 - DNA, 61 bp, Artificial Sequence
  Synthetic construct; promoter sequence
gggacgcgcgggcggggtgggctgtgccccgcgggaaccccgccggcctgtgcgcttgctg

SEQ ID NO: 62 - DNA, 60 bp, Artificial Sequence
  Synthetic construct; promoter sequence
ctccctcccgcgctccccgcgctcgggcgccgcagagctgtccagcttcagtgccgaacc

SEQ ID NO: 63 - DNA, 60 bp, Artificial Sequence
  Synthetic construct; promoter sequence
gtactggtgtacaaggacaaggtgactttttttcttttcccagattgaaagggccaaaga

SEQ ID NO: 64 - DNA, 60 bp, Artificial Sequence
  Synthetic construct; promoter sequence
cctccgccgctcagccccggactccttacgtcagggtagcggggtcccccctccgcgcgg

SEQ ID NO: 65 - DNA, 60 bp, Artificial Sequence
  Synthetic construct; promoter sequence
ccaggagagctcggcaagtatataaggacagaggagcgcgggaccaagcggcggcgaagg

SEQ ID NO: 66 - DNA, 60 bp, Artificial Sequence
  Synthetic construct; promoter sequence
ttccttcagctgtgtcttaaagtaaatcttgttgtggagcggagccctcagctgagggag

SEQ ID NO: 67 - DNA, 60 bp, Artificial Sequence
  Synthetic construct; promoter sequence
gtaagtatcttcttcttcccctcgtgagtccctccccttttccagaatcacttgcactgt

SEQ ID NO: 68 - DNA, 60 bp, Artificial Sequence
  Synthetic construct; promoter sequence
ggggcggagcggagacagtaccttcggagataatcctttctcctgccgcagtggagagga

SEQ ID NO: 69 - DNA, 60 bp, Artificial Sequence
  Synthetic construct; promoter sequence
ccctgcctagtctccatataaaagcggcgccgcctccccgccctctctcactccccgctc

SEQ ID NO: 70 - DNA, 60 bp, Artificial Sequence
  Synthetic construct; promoter sequence
gggcggcccagccccaggttacgtcgtccccagaaagaatctggccaacagtctggccgt

SEQ ID NO: 71 - DNA, 99 bp, Artificial Sequence
  Synthetic construct; promoter sequence
ggcaggttctcttacatcgaccgcttaagagtcgcgctgtaagaagcaacacctcctcctcgcctccgccatccacccggcagccgcgaagcagcaacc

SEQ ID NO: 72 - DNA, 865 bp, Artificial Sequence
  Synthetic construct; promoter sequence
ccactacgggtttaggctgcccatgtaaggaggcaaggcctggggacacccgagatgcctggttataattaacccagacatgtggctgccccccccccccccaacacctgctgcctctaaaaataaccctgtccctggtggatcccactacgggtttaggctgcccatgtaaggaggcaaggcctggggacacccgagatgcctggttataattaacccagacatgtggctgccccccccccccccaacacctgctgcctctaaaaataaccctgtccctggtggatcccactacgggtttaggctgcccatgtaaggaggcaaggcctggggacacccgagatgcctggttataattaacccagacatgtggctgccccccccccccccaacacctgctgcctctaaaaataaccctgtccctggtggatcccctgcatgcgaagatcttcgaacaaggctgtgggggactgagggcaggctgtaacaggcttgggggccagggcttatacgtgcctgggactcccaaagtattactgttccatgttcccggcgaagggccagctgtcccccgccagctagactcagcacttagtttaggaaccagtgagcaagtcagcccttggggcagcccatacaaggccatggggctgggcaagctgcacgcctgggtccggggtgggcacggtgcccgggcaacgagctgaaagctcatctgctctcaggggcccctccctggggacagcccctcctggctagtcacaccctgtaggctcctctatataacccaggggcacaggggctgccctcattctaccaccacctccacagcacagacagacactcaggagccagccagcgtcga

SEQ ID NO: 73 - DNA, 251 bp, Artificial Sequence
  Synthetic construct; promoter sequence
atggaggcggtactatgtagatgagaattcaggagcaaactgggaaaagcaactgcttccaaatatttgtgatttttacagtgtagttttggaaaaactcttagcctaccaattcttctaagtgttttaaaatgtgggagccagtacacatgaagttatagagtgttttaatgaggcttaaatatttaccgtaactatgaaatgctacgcatatcatgctgttcaggctccgtggccacgcaactcatact

SEQ ID NO: 74 - DNA, 212 bp, Artificial Sequence
  Synthetic construct; promoter sequence
gggcagagcgcacatcgcccacagtccccgagaagttggggggaggggtcggcaattgaacgggtgcctagagaaggtggcgcggggtaaactgggaaagtgatgtcgtgtactggctccgcctttttcccgagggtgggggagaaccgtatataagtgcagtagtcgccgtgaacgttctttttcgcaacgggtttgccgccagaacacag

SEQ ID NO: 75 - DNA, 460 bp, Artificial Sequence
  Synthetic construct; promoter sequence
gggctggaagctacctttgacatcatttcctctgcgaatgcatgtataatttctacagaacctattagaaaggatcacccagcctctgcttttgtacaactttcccttaaaaaactgccaattccactgctgtttggcccaatagtgagaactttttcctgctgcctcttggtgcttttgcctatggcccctattctgcctgctgaagacactcttgccagcatggacttaaacccctccagctctgacaatcctctttctcttttgttttacatgaagggtctggcagccaaagcaatcactcaaagttcaaaccttatcattttttgctttgttcctcttggccttggttttgtacatcagctttgaaaataccatcccagggttaatgctggggttaatttataactaagagtgctctagttttgcaatacaggacatgctataaaaatggaaagat

SEQ ID NO: 76 - DNA, 723 bp, Artificial Sequence
  Synthetic construct; promoter sequence
aggctcagaggcacacaggagtttctgggctcaccctgcccccttccaacccctcagttcccatcctccagcagctgtttgtgtgctgcctctgaagtccacactgaacaaacttcagcctactcatgtccctaaaatgggcaaacattgcaagcagcaaacagcaaacacacagccctccctgcctgctgaccttggagctggggcagaggtcagagacctctctgggcccatgccacctccaacatccactcgaccccttggaatttcggtggagaggagcagaggttgtcctggcgtggtttaggtagtgtgagaggggtacccggggatcttgctaccagtggaacagccactaaggattctgcagtgagagcagagggccagctaagtggtactctcccagagactgtctgactcacgccaccccctccaccttggacacaggacgctgtggtttctgagccaggtacaatgactcctttcggtaagtgcagtggaagctgtacactgcccaggcaaagcgtccgggcagcgtaggcgggcgactcagatcccagccagtggacttagcccctgtttgctcctccgataactggggtgaccttggttaatattcaccagcagcctcccccgttgcccctctggatccactgcttaaatacggacgaggacagggccctgtctcctcagcttcaggcaccaccactgacctgggacagt

SEQ ID NO: 77 - DNA, 75 bp, Artificial Sequence
  Synthetic construct; furin T2A
agaaagagaagaggctctggagaaggcagaggctccctgctgacatgtggggatgttgaagagaatcctgggcct

SEQ ID NO: 78 - DNA, 12 bp, Artificial Sequence
  synthetic construct; furin
agaaagagaaga

SEQ ID NO: 79 - DNA, 21 bp, Artificial Sequence
  synthetic construct; furin-linker
agaaagagaagaggctctgga

SEQ ID NO: 80 - DNA, 9 bp, Artificial Sequence
  synthetic construct; linker
ggctctgga

SEQ ID NO: 81 - DNA, 18 bp, Artificial Sequence
  synthetic construct; linker
ggctctggaggctctgga

SEQ ID NO: 82 - DNA, 15 bp, Artificial Sequence
  synthetic construct; linker
ggcggaggaggctct

SEQ ID NO: 83 - DNA, 54 bp, Artificial Sequence
  synthetic construct; T2A
gaaggcagaggctccctgctgacatgtggggatgttgaagagaatcctgggcct

SEQ ID NO: 84 - DNA, 127 bp, Artificial Sequence
  synthetic construct; rabbit globin poly A
gatctttttccctctgccaaaaattatggggacatcatgaagccccttgagcatctgacttctggctaataaaggaaatttattttcattgcaatagtgtgttggaattttttgtgtctctcactcg

SEQ ID NO: 85 - DNA, 55 bp, Artificial Sequence
  synthetic construct; b-globin polyA signal
ataaaggaaatttattttcattgcaatagtgtgttggaattttttgtgtctctca

SEQ ID NO: 86 - DNA, 60 bp, Artificial Sequence
  synthetic construct; IL-2 leader peptide
atgtacagaatgcagctgctgctgctcattgccctgtctctggccctggtcaccaattct

SEQ ID NO: 87 - protein, 20 aa, Artificial Sequence
  synthetic sequence; signaling sequence
MYRMQLLLLIALSLALVTNS

SEQ ID NO: 88 - protein, 26 aa, Artificial Sequence
  synthetic construct; signal peptide
MNFLLSWVHWSLALLLYLHHAKWSQA

SEQ ID NO: 89 - protein, 29 aa, Artificial Sequence
  synthetic construct; signal peptide
MERAAPSRRVPLPLLLLGGLALLAAGVDA

SEQ ID NO: 90 - protein, 19 aa, Artificial Sequence
  synthetic construct; signal peptide
MAPLRPLLILALLAWVALA

SEQ ID NO: 91 - protein, 18 aa, Artificial Sequence
  synthetic construct; signal peptide
MRLLAKIICLMLWAICVA

SEQ ID NO: 92 - protein, 19 aa, Artificial Sequence
  synthetic construct; signal peptide
MRLLAFLSLLALVLQETGT

SEQ ID NO: 93 - protein, 18 aa, Artificial Sequence
  synthetic construct; signal peptide
MKWVTFISLLFLFSSAYS

SEQ ID NO: 94 - protein, 18 aa, Artificial Sequence
  synthetic construct; signal peptide
MAFLWLLSCWALLGTTFG

SEQ ID NO: 95 - protein, 20 aa, Artificial Sequence
  synthetic construct; signal peptide
MYRMQLLSCIALILALVTNS

SEQ ID NO: 96 - protein, 15 aa, Artificial Sequence
  synthetic construct; signal peptide
MNLLLILTFVAAAVA

SEQ ID NO: 97 - protein, 122 aa, Artificial Sequence
  Synthetic construct; antibody chain
EVQLVQSGAEVKKPGESLKISCKVSGYDFSKYWIGWVRQMPGKGLEWMGLIYPGDSDTRYSPSLEGQVSISADKSISAAYLQFSSLKASDSAMYYCVRKGYSAYLGGWFDPWGQGTLVTVSS

SEQ ID NO: 98 - protein, 113 aa, Artificial Sequence
  Synthetic construct; antibody chain
DIQLTQSPDSLAASLGERVTINCRSSQNIFYNSNNKNFLAWYQQKAGQSPKLLIYWASTRESGVPDRFSGSGSGTDFTLTISGLQAGDVAVYFCQQYFTDAPTFGGGTKVEIK

SEQ ID NO: 99 - protein, 126 aa, Artificial Sequence
  Synthetic construct; antibody chain
EVQLLQSGGGVVQPGGSLRLSCEASGFTFSSYSMHWVRQAPGKGLEWLTLISYNGVNKYYAKSVKGRFAISRDDSKSTLFLQMNSLTTDDTAVYYCARCPIPRAASYRNGDNYFEFGQGTLVTVSS

SEQ ID NO: 100 - protein, 110 aa, Artificial Sequence
  Synthetic construct; antibody chain
QAVVTQEPSLSVSPGGTVTLTCALSSASVSTSSYPSWYQQTPGQPPRMLIHNTDTRSSGVPDRFSGSILGKKAALTITGAQADDESDYYCVVYLGNGFWVFGGGTKLTVL

SEQ ID NO: 101 - protein, 116 aa, Artificial Sequence
  Synthetic construct; antibody chain
EVQLVESGGGLVQPGGSLRLSCAASGFTFSIYTMSWVRQAPGKGLEWVSAILSDGSTYYADSVEGRFTISRDNSKTTLYLQMNSLTAEDTAVYYCTKRVEGSFRGWGQGTLVTVSS

SEQ ID NO: 102 - protein, 109 aa, Artificial Sequence
  Synthetic construct; antibody chain
EIVMTQSPGTLSLSPGESATLSCRASQSVSTTYLAWYQQKPGQAPRLLIYGASSRATGIPDRFSGSGSGTDFTLTISRLEPEDFAVYYCQQYGGSRLITFGQGTRLEIK

SEQ ID NO: 103 - protein, 330 aa, Artificial Sequence
  Synthetic construct; antibody chain
ASTKGPSVFPLAPSSKSTSGGTAALGCLVKDYFPEPVTVSWNSGALTSGVHTFPAVLQSSGLYSLSSVVTVPSSSLGTQTYICNVNHKPSNTKVDKRVEPKSCDKTHTCPPCPAPELLGGPSVFLFPPKPKDTLMISRTPEVTCVVVDVSHEDPEVKFNWYVDGVEVHNAKTKPREEQYNSTYRVVSVLTVLHQDWLNGKEYKCKVSNKALPAPIEKTISKAKGQPREPQVYTLPPSREEMTKNQVSLTCLVKGFYPSDIAVEWESNGQPENNYKTTPPVLDSDGSFFLYSKLTVDKSRWQQGNVFSCSVMHEALHNHYTQKSLSLSPGK

SEQ ID NO: 104 - DNA, 990 bp, Artificial Sequence
  Synthetic construct; antibody chain
gccagcacaaagggcccctctgtttttccactggctcccagcagcaagagcaccagtggtggaacagctgccctgggctgtctggtcaaggattacttccctgagcctgtgactgtgtcctggaactctggtgcactgacctctggggtgcacacctttccagctgtgctgcagtcctctggcctgtactctctgtcctctgtggtcacagtgcctagctctagcctgggcacccagacctacatctgcaatgtgaaccacaagcctagcaacaccaaggtggacaaaagagtggaacccaagagctgtgacaagacccacacctgtcctccatgtcctgctccagaactgcttggaggcccttctgtgttcctgtttcctccaaagcctaaggacaccctgatgatcagcagaacccctgaagtgacctgtgtggtggttgatgtgtcccatgaggacccagaagtgaagttcaattggtatgtggatggggttgaagtgcacaatgccaagaccaagcctagagaggaacagtacaactccacctacagagtggtgtctgtgctgacagtgctgcaccaggactggctgaatggcaaagagtacaagtgcaaggtgtccaacaaggccctgcctgctcctattgagaaaaccatctccaaggccaagggccagccaagagaaccccaggtttacaccctgccacctagcagagaagagatgaccaagaaccaggtgtccctgacctgcctggttaagggcttctacccctctgacattgctgtggaatgggagagcaatggccagcctgaaaacaactacaagacaacccctcctgtgctggactcagatggctcattcttcctgtacagcaagctgactgtggacaagtccaggtggcagcagggaaatgtgttcagctgctctgtgatgcatgaggccctgcacaaccactacacccagaaaagtctgagtctgagccctggcaag

SEQ ID NO: 105 - protein, 326 aa, Artificial Sequence
  Synthetic construct; antibody chain
ASTKGPSVFPLAPCSRSTSESTAALGCLVKDYFPEPVTVSWNSGALTSGVHTFPAVLQSSGLYSLSSVVTVPSSNFGTQTYTCNVDHKPSNTKVDKTVERKCCVECPPCPAPPVAGPSVFLFPPKPKDTLMISRTPEVTCVVVDVSHEDPEVQFNWYVDGVEVHNAKTKPREEQFNSTFRVVSVLTVVHQDWLNGKEYKCKVSNKGLPAPIEKTISKTKGQPREPQVYTLPPSREEMTKNQVSLTCLVKGFYPSDISVEWESNGQPENNYKTTPPMLDSDGSFFLYSKLTVDKSRWQQGNVFSCSVMHEALHNHYTQKSLSLSPGK

SEQ ID NO: 106 - DNA, 981 bp, Artificial Sequence
  Synthetic construct; antibody chain
gcgagcaccaaaggcccgagcgtgtttccgctggcgccgtgcagccgcagcaccagcgaaagcaccgcggcgctgggctgcctggtgaaagattattttccggaaccggtgaccgtgagctggaacagcggcgcgctgaccagcggcgtgcatacctttccggcggtgctgcagagcagcggcctgtatagcctgagcagcgtggtgaccgtgccgagcagcaactttggcacccagacctatacctgcaacgtggatcataaaccgagcaacaccaaagtggataaaaccgtggaacgcaaatgctgcgtggaatgcccgccgtgcccggcgccgccggtggcgggcccgagcgtgtttctgtttccgccgaaaccgaaagataccctgatgattagccgcaccccggaagtgacctgcgtggtggtggatgtgagccatgaagatccggaagtgcagtttaactggtatgtggatggcgtggaagtgcataacgcgaaaaccaaaccgcgcgaagaacagtttaacagcacctttcgcgtggtgagcgtgctgaccgtggtgcatcaggattggctgaacggcaaagaatataaatgcaaagtgagcaacaaaggcctgccggcgccgattgaaaaaaccattagcaaaaccaaaggccagccgcgcgaaccgcaggtgtataccctgccgccgagccgcgaagaaatgaccaaaaaccaggtgagcctgacctgcctggtgaaaggcttttatccgagcgatattagcgtggaatgggaaagcaacggccagccggaaaacaactataaaaccaccccgccgatgctggatagcgatggcagcttttttctgtatagcaaactgaccgtggataaaagccgctggcagcagggcaacgtgtttagctgcagcgtgatgcatgaagcgctgcataaccattatacccagaaaagcctgagcctgagcccgggcaaataa

SEQ ID NO: 107 - protein, 327 aa, Artificial Sequence
  Synthetic construct; antibody chain
ASTKGPSVFPLAPCSRSTSESTAALGCLVKDYFPEPVTVSWNSGALTSGVHTFPAVLQSSGLYSLSSVVTVPSSSLGTKTYTCNVDHKPSNTKVDKRVESKYGPPCPSCPAPEFLGGPSVFLFPPKPKDTLMISRTPEVTCVVVDVSQEDPEVQFNWYVDGVEVHNAKTKPREEQFNSTYRVVSVLTVLHQDWLNGKEYKCKVSNKGLPSSIEKTISKAKGQPREPQVYTLPPSQEEMTKNQVSLTCLVKGFYPSDIAVEWESNGQPENNYKTTPPVLDSDGSFFLYSRLTVDKSRWQEGNVFSCSVMHEALHNHYTQKSLSLSLGK

SEQ ID NO: 108 - DNA, 981 bp, Artificial Sequence
  Synthetic construct; antibody chain
gcctccaccaagggcccatcggtcttccccctggcgccctgctccaggagcacctccgagagcacagcggccctgggctgcctggtcaaggactacttccccgaaccggtgacggtgtcgtggaactcaggcgccctgaccagcggcgtgcacaccttcccggctgtcctacagtcctcaggactctactccctcagcagcgtggtgaccgtgccctccagcagcttgggcacgaagacctacacctgcaatgtagatcacaagcccagcaacaccaaggtggacaagagagttgagtccaaatatggtcccccgtgcccatcatgcccagcacctgaattcctggggggaccatcagtcttcctgttccccccaaaacccaaggacaccctcatgatctcccggacccctgaggtcacgtgcgtggtggtggacgtgagccaggaagaccccgaggtccagttcaactggtacgtggatggcgtggaggtgcataatgccaagacaaagccgcgggaggagcagttcaacagcacgtaccgtgtggtcagcgtcctcaccgtcgtgcaccaggactggctgaacggcaaggagtacaagtgcaaggtctccaacaaaggcctcccgtcctccatcgagaaaaccatctccaaagccaaagggcagccccgagagccacaggtgtacaccctgcccccatcccaggaggagatgaccaagaaccaggtcagcctgacctgcctggtcaaagccttctaccccagcgacatcgccgtggagtgggagagcaatgggcagccggagaacaactacaagaccacgcctcccgtgctggactccgacggctccttcttcctctacagcaggctaaccgtggacaagagcaggtggcaggaggggaatgtcttctcatgctccgtgatgcatgaggctctgcacaaccactacacgcagaagagcctctccctgtctctgggtaaa

SEQ ID NO: 109 - protein, 327 aa, Artificial Sequence
  Synthetic construct; antibody chain
ASTKGPSVFPLAPCSRSTSESTAALGCLVKDYFPEPVTVSWNSGALTSGVHTFPAVLQSSGLYSLSSVVTVPSSSLGTKTYTCNVDHKPSNTKVDKRVESKYGPPCPPCPAPEFLGGPSVFLFPPKPKDTLMISRTPEVTCVVVDVSQEDPEVQFNWYVDGVEVHNAKTKPREEQFNSTYRVVSVLTVLHQDWLNGKEYKCKVSNKGLPSSIEKTISKAKGQPREPQVYTLPPSQEEMTKNQVSLTCLVKGFYPSDIAVEWESNGQPENNYKTTPPVLDSDGSFFLYSRLTVDKSRWQEGNVFSCSVMHEALHNHYTQKSLSLSLGK

SEQ ID NO: 110 - protein, 330 aa, Artificial Sequence
  Synthetic construct; antibody chain
ASTKGPSVFPLAPSSKSTSGGTAALGCLVKDYFPEPVTVSWNSGALTSGVHTFPAVLQSSGLYSLSSVVTVPSSSLGTQTYICNVNHKPSNTKVDKKVEPKSCDKTHTCPPCPAPEAAGGPSVFLFPPKPKDTLMISRTPEVTCVVVDVSHEDPEVKFNWYVDGVEVHNAKTKPREEQYNSTYRVVSVLTVLHQDWLNGKEYKCKVSNKALGAPIEKTISKAKGQPREPQVYTLPPSRDELTKNQVSLTCLVKGFYPSDIAVEWESNGQPENNYKTTPPVLDSDGSFFLYSKLTVDKSRWQQGNVFSCSVMHEALHNHYTQKSLSLSPGK

SEQ ID NO: 111 - DNA, 990 bp, Artificial Sequence
  Synthetic construct; antibody chain
gcgagcaccaaaggcccgagcgtgtttccgctggcgccgagcagcaaaagcaccagcggcggcaccgcggcgctgggctgcctggtgaaagattattttccggaaccggtgaccgtgagctggaacagcggcgcgctgaccagcggcgtgcatacctttccggcggtgctgcagagcagcggcctgtatagcctgagcagcgtggtgaccgtgccgagcagcagcctgggcacccagacctatatttgcaacgtgaaccataaaccgagcaacaccaaagtggataaaaaagtggaaccgaaaagctgcgataaaacccatacctgcccgccgtgcccggcgccggaagcggcgggcggcccgagcgtgtttctgtttccgccgaaaccgaaagataccctgatgattagccgcaccccggaagtgacctgcgtggtggtggatgtgagccatgaagatccggaagtgaaatttaactggtatgtggatggcgtggaagtgcataacgcgaaaaccaaaccgcgcgaagaacagtataacagcacctatcgcgtggtgagcgtgctgaccgtgctgcatcaggattggctgaacggcaaagaatataaatgcaaagtgagcaacaaagcgctgggcgcgccgattgaaaaaaccattagcaaagcgaaaggccagccgcgcgaaccgcaggtgtataccctgccgccgagccgcgatgaactgaccaaaaaccaggtgagcctgacctgcctggtgaaaggcttttatccgagcgatattgcggtggaatgggaaagcaacggccagccggaaaacaactataaaaccaccccgccggtgctggatagcgatggcagcttttttctgtatagcaaactgaccgtggataaaagccgctggcagcagggcaacgtgtttagctgcagcgtgatgcatgaagcgctgcataaccattatacccagaaaagcctgagcctgagcccgggcaaa

SEQ ID NO: 112 - protein, 330 aa, Artificial Sequence
  Synthetic construct; antibody chain
AKTTAPSVYPLAPVCGDTTGSSVTLGCLVKGYFPEPVTLTWNSGSLSSGVHTFPAVLQSDLYTLSSSVTVTSSTWPSQSITCNVAHPASSTKVDKKIEPRGPTIKPCPPCKCPAPNLLGGPSVFIFPPKIKDVLMISLSPIVTCVVVDVSEDDPDVQISWFVNNVEVHTAQTQTHREDYNSTLRVVSALPIQHQDWMSGKEFKCKVNNKDLPAPIERTISKPKGSVRAPQVYVLPPPEEEMTKKQVTLTCMVTDFMPEDIYVEWTNNGKTELNYKNTEPVLDSDGSYFMYSKLRVEKKNWVERNSYSCSVVHEGLHNHHTTKSFSRTPGK

SEQ ID NO: 113 - DNA, 990 bp, Artificial Sequence
  Synthetic construct; antibody chain
gctaagacaacagccccttctgtgtaccctctggctcctgtgtgtggggacacaacaggatcctctgtgacactgggctgcctggtcaagggctactttcctgagccagtgacactgacctggaactctggatctctgtcctctggggtgcacacattccctgctgtgctgcagtctgacctgtacaccctgagcagcagtgtgacagtgaccagcagcacatggcccagccagagcatcacctgtaatgtggctcaccctgccagctccaccaaggtggacaagaagattgagcctagaggccccaccatcaagccctgtcctccatgcaagtgtcctgctcctaacctgcttggaggcccctctgtgttcatcttcccacctaagatcaaggatgtgctgatgatctctctgagccccattgtgacctgtgtggtggttgatgtgtctgaggatgacccagatgtgcagatctcttggtttgtgaacaatgtggaagtgcacacagcccagacacagacccacagagaggactacaacagcaccctgagagtggtgtctgccctgcctatccagcaccaggactggatgtctggcaaagagttcaagtgcaaagtgaacaacaaggacctgcctgctccaattgagagaaccatcagcaagcccaagggctctgttagagcccctcaagtgtatgtgctgcctccacctgaggaagagatgaccaagaaacaagtgaccctgacatgcatggtcactgacttcatgcctgaggacatctatgtggaatggaccaacaatggcaagacagagctgaactacaagaacactgagcctgtgctggactctgatggcagctacttcatgtacagcaagctgagggttgagaagaagaactgggttgagagaaacagctactcctgctctgtggtgcatgagggcctgcacaaccatcacaccacaaagagcttcagcagaaccccaggcaag

SEQ ID NO: 114 - protein, 330 aa, Artificial Sequence
  Synthetic construct; antibody chain
AKTTAPSVYPLAPVCGDTTGSSVTLGCLVKGYFPEPVTLTWNSGSLSSGVHTFPAVLQSDLYTLSSSVTVTSSTWPSQSITCNVAHPASSTKVDKKIEPRGPTIKPCPPCKCPAPNAAGGPSVFIFPPKIKDVLMISLSPIVTCVVVDVSEDDPDVQISWFVNNVEVHTAQTQTHREDYNSTLRVVSALPIQHQDWMSGKEFKCKVNNKDLGAPIERTISKPKGSVRAPQVYVLPPPEEEMTKKQVTLTCMVTDFMPEDIYVEWTNNGKTELNYKNTEPVLDSDGSYFMYSKLRVEKKNWVERNSYSCSVVHEGLHNHHTTKSFSRTPGK

SEQ ID NO: 115 - DNA, 990 bp, Artificial Sequence
  Synthetic construct; antibody chain
gccaagacaactgccccttctgtgtaccctctggctcctgtgtgtggggacacaacaggatcctctgtgacactgggctgcctggtcaagggctactttcctgagccagtgacactgacctggaactctggatctctgtcctctggggtgcacacattccctgctgtgctgcagtctgacctgtacaccctgagcagctctgtgactgtgaccagcagcacatggcccagccagagcatcacctgtaatgtggctcaccctgccagctccaccaaggtggacaagaagattgagcctagaggccccaccatcaagccctgtcctccatgcaagtgtcctgctcctaacgccgctggaggcccctctgtgttcatcttcccacctaagatcaaggatgtgctgatgatctctctgagccccattgtgacctgtgtggtggttgatgtgtctgaggatgaccctgatgtgcagatctcttggtttgtgaacaatgtggaagtgcacacagcccagacacagacccacagagaggactacaacagcaccctgagagtggtgtctgccctgcctatccagcaccaggactggatgtctggcaaagagttcaagtgcaaagtgaacaacaaggacctgggagctccaattgagagaaccatctccaagcctaagggctctgtcagggcccctcaagtgtatgtgctgccacctcctgaggaagagatgaccaagaaacaagtgaccctgacatgcatggtcacagacttcatgcctgaggacatctatgtggaatggaccaacaatggcaagacagagctgaactacaagaacactgagcctgtgctggactctgatggctcctacttcatgtacagcaagctgagggttgagaagaagaactgggttgagagaaacagctacagctgctctgtggtgcatgagggcctgcacaatcaccacaccaccaagagcttcagcagaacccctggcaag

SEQ ID NO: 116 - protein, 107 aa, Artificial Sequence [sequence omitted]

SEQ ID NO: 117 - DNA, 321 bp, Artificial Sequence
  Synthetic construct; antibody chain
agaacagtggctgccccatctgtgttcatcttcccaccatctgatgagcagctcaagtctggcactgcctctgttgtgtgcctgctgaacaacttctaccctagagaagccaaggtgcagtggaaggttgacaatgccctgcagtctggcaatagccaagaatctgtgacagagcaggactccaaggatagcacctacagcctgtctagcaccctgacactgagcaaggctgactatgagaagcacaaagtgtatgcctgtgaagtgacacaccagggcctgagcagcccagtgaccaagagcttcaatagaggggagtgc

SEQ ID NO: 118 - protein, 106 aa, Artificial Sequence
  Synthetic construct; antibody chain
GQPKSSPSVTLFPPSSEELETNKATLVCTITDFYPGVVTVDWKVDGTPVTQGMETTQPSKQSNNKYMASSYLTLTARAWERHSSYSCQVTHEGHTVEKSLSRADCS

SEQ ID NO: 119 - DNA, 318 bp, Artificial Sequence
  Synthetic construct; antibody chain
ggccagcctaaaagcagcccctctgtgacactgttccctccaagctctgaggaactggaaacaaacaaggccacacttgtgtgcaccatcacagacttctaccctggggttgtgacagtggactggaaagtggatggcacccctgtgacacaaggcatggaaaccacacagcccagcaagcagagcaacaacaagtacatggccagctcctatctgaccctgacagccagagcctgggagagacacagctcttacagctgccaagtgacccatgagggccacacagtggaaaagagcctgagcagagctgactgctct

SEQ ID NO: 120 - protein, 11 aa, Artificial Sequence
  synthetic construct; Tau epitope
TPPTREPKKVA

SEQ ID NO: 121 - protein, 7 aa, Artificial Sequence
  synthetic construct; tau epitope
PMPDLKN

SEQ ID NO: 122 - protein, 18 aa, Artificial Sequence
  synthetic construct; tau epitope
  misc (8)..(8): Serine is phosphorylated
  misc (11)..(11): Threonine is phosphorylated
SGYSSPGSPGTPGSRSRT

SEQ ID NO: 123 - protein, 18 aa, Artificial Sequence
  synthetic construct; tau epitope
  misc (9)..(9): Threonine is phosphorylated
  misc (11)..(11): Serine is phosphorylated
GTPGSRSRTPSLPTPPTR

SEQ ID NO: 124 - protein, 31 aa, Artificial Sequence
  synthetic construct; AAV capsid protein
AKSANVDFTVDNNGLYTEPRPIGTRYLTRPL

SEQ ID NO: 125 - protein, 31 aa, Artificial Sequence
  synthetic construct; AAV capsid protein
NKSVNVDFTVDTNGVYSEPRPIGTRYLTRNL

SEQ ID NO: 126 - protein, 31 aa, Artificial Sequence; identical to SEQ ID NO: 125
  synthetic construct; AAV capsid protein

SEQ ID NO: 127 - protein, 31 aa, Artificial Sequence
  synthetic construct; AAV capsid protein
GQQNSLLWAPDAAGKYTEPRAIGTRYLTHHL

SEQ ID NO: 128 - protein, 31 aa, Artificial Sequence
  synthetic construct; AAV capsid protein
NDPQFVDFAPDSTGEYRTTRPIGTRYLTRPL

SEQ ID NO: 129 - protein, 31 aa, Artificial Sequence; identical to SEQ ID NO: 124
  synthetic construct; AAV capsid protein

SEQ ID NO: 130 - protein, 31 aa, Artificial Sequence
  synthetic construct; AAV capsid protein
EKQTGVDFAVDSQGVYSEPRPIGTRYLTRNL

SEQ ID NO: 131 - protein, 31 aa, Artificial Sequence
  synthetic construct; AAV capsid protein
YKSTSVDFAVNTEGVYSEPRPIGTRYLTRNL

SEQ ID NO: 132 - protein, 31 aa, Artificial Sequence
  synthetic construct; AAV capsid protein
YKSNNVEFAVNTEGVYSEPRPIGTRYLTRNL

SEQ ID NO: 133 - protein, 31 aa, Artificial Sequence
  synthetic construct; AAV capsid protein
YKSTNVDFAVNTDGTYSEPRPIGTRYLTRNL

SEQ ID NO: 134 - protein, 31 aa, Artificial Sequence
  synthetic construct; AAV capsid protein
YKSTNVDFAVNTEGTYSEPRPIGTRYLTRNL

SEQ ID NO: 135 - protein, 31 aa, Artificial Sequence; identical to SEQ ID NO: 134
  synthetic construct; AAV capsid protein

SEQ ID NO: 136 - protein, 31 aa, Artificial Sequence; identical to SEQ ID NO: 134
  synthetic construct; AAV capsid protein

SEQ ID NO: 137 - protein, 31 aa, Artificial Sequence; identical to SEQ ID NO: 134
  synthetic construct; AAV capsid protein

SEQ ID NO: 138 - protein, 31 aa, Artificial Sequence
  synthetic construct; furin 2A linker
RKRRGSGAPVKQTLNFDLLKLAGDVESNPGP

SEQ ID NO: 139 - protein, 25 aa, Artificial Sequence
  synthetic construct; linker
RKRRGSGEGRGSLLTCGDVEENPGP

SEQ ID NO: 140 - protein, 3 aa, Artificial Sequence
  synthetic construct; linker
GSG

SEQ ID NO: 141 - protein, 21 aa, Artificial Sequence
  synthetic construct; linker
GSGEGRGSLLTCGDVEENPGP

SEQ ID NO: 142 - protein, 22 aa, Artificial Sequence
  synthetic construct; linker
GSGATNFSLLKQAGDVEENPGP

SEQ ID NO: 143 - protein, 23 aa, Artificial Sequence
  synthetic construct; linker
GSGQCTNYALLKLAGDVESNPGP

SEQ ID NO: 144 - protein, 27 aa, Artificial Sequence
  synthetic construct; linker
GSGAPVKQTLNFDLLKLAGDVESNPGP

SEQ ID NO: 145 - protein, 4 aa, Artificial Sequence
  sythetic construct; linker
RKRR

SEQ ID NO: 146 - protein, 4 aa, Artificial Sequence
  synthetic construct; linker
RRRR

SEQ ID NO: 147 - protein, 4 aa, Artificial Sequence
  synthetic construct; linker
RRKR

SEQ ID NO: 148 - protein, 4 aa, Artificial Sequence
  synthetic construct; linker
RKKR

SEQ ID NO: 149 - protein, 5 aa, Artificial Sequence
  synthetic construct; linker
GGGGS

SEQ ID NO: 150 - protein, 10 aa, Artificial Sequence
  synthetic construct; linker
GGGGSGGGGS

SEQ ID NO: 151 - protein, 15 aa, Artificial Sequence
  synthetic construct; linker
GGGGSGGGGSGGGGS

SEQ ID NO: 152 - protein, 20 aa, Artificial Sequence
  synthetic construct; linker
GGGGSGGGGSGGGGSGGGGS

SEQ ID NO: 153 - protein, 25 aa, Artificial Sequence
  synthetic construct; linker
GGGGSGGGGSGGGGSGGGGSGGGGS

SEQ ID NO: 154 - protein, 5 aa, Artificial Sequence
  Synthetic construct; antibody chain
KYWIG

SEQ ID NO: 155 - protein, 15 aa, Artificial Sequence
  Synthetic construct; antibody chain
LIYPGDSDTREFERE

SEQ ID NO: 156 - protein, 13 aa, Artificial Sequence
  Synthetic construct; antibody chain
KGYSAYLGGWFDP

SEQ ID NO: 157 - protein, 17 aa, Artificial Sequence
  Synthetic construct; antibody chain
RSSQNIFYNSNNKNFLA

SEQ ID NO: 158 - protein, 7 aa, Artificial Sequence
  Synthetic construct; antibody chain
WASTRES

SEQ ID NO: 159 - protein, 9 aa, Artificial Sequence
  Synthetic construct; antibody chain
QQYFTDAPT

SEQ ID NO: 160 - protein, 5 aa, Artificial Sequence
  Synthetic construct; antibody chain
SYSMH

SEQ ID NO: 161 - protein, 17 aa, Artificial Sequence
  Synthetic construct; antibody chain
LISYNGVNKYYAKSVKG

SEQ ID NO: 162 - protein, 17 aa, Artificial Sequence
  Synthetic construct; antibody chain
CPIPRAASYRNGDNYFE

SEQ ID NO: 163 - protein, 14 aa, Artificial Sequence
  Synthetic construct; antibody chain
ALSSASVSTSSYPS

SEQ ID NO: 164 - protein, 7 aa, Artificial Sequence
  Synthetic construct; antibody chain
NTDTRSS

SEQ ID NO: 165 - protein, 10 aa, Artificial Sequence
  Synthetic construct; antibody chain
VVYLGNGFWV

SEQ ID NO: 166 - protein, 5 aa, Artificial Sequence
  Synthetic construct; antibody chain
IYTMS

SEQ ID NO: 167 - protein, 16 aa, Artificial Sequence
  Synthetic construct; antibody chain
AILSDGSTYYADSVEG

SEQ ID NO: 168 - protein, 8 aa, Artificial Sequence
  Synthetic construct; antibody chain
RVEGSFRG

SEQ ID NO: 169 - protein, 7 aa, Artificial Sequence
  Synthetic construct; antibody chain
GASSRAT

SEQ ID NO: 170 - protein, 12 aa, Artificial Sequence
  Synthetic construct; antibody chain
RASQSVSTTYLA

SEQ ID NO: 171 - protein, 10 aa, Artificial Sequence
  Synthetic construct; antibody chain
QQYGGSRLIT

SEQ ID NO: 172 - protein, 22 aa, Artificial Sequence
  Synthetic construct; antibody chain
EPKSCDKTHTCPPCPAPELLGG

SEQ ID NO: 173 - protein, 16 aa, Artificial Sequence
  Synthetic construct; antibody chain
EPKSCDKTHTCPPCPA

SEQ ID NO: 174 - protein, 10 aa, Artificial Sequence
  Synthetic construct; antibody chain
EPKSCDKTHT

SEQ ID NO: 175 - protein, 22 aa, Artificial Sequence
  Synthetic construct; antibody chain
EPKSCDKTHLCPPCPAPELLGG

SEQ ID NO: 176 - protein, 16 aa, Artificial Sequence
  Synthetic construct; antibody chain
EPKSCDKTHLCPPCPA

SEQ ID NO: 177 - protein, 10 aa, Artificial Sequence
  Synthetic construct; antibody chain
EPKSCDKTHL

SEQ ID NO: 178 - protein, 27 aa, Artificial Sequence
  Synthetic construct; antibody chain
EPKSCDKTHTCPPCPAPELLGGPSVFL

SEQ ID NO: 179 - protein, 27 aa, Artificial Sequence
  Synthetic construct; antibody chain
EPKSCDKTHLCPPCPAPELLGGPSVFL

SEQ ID NO: 180 - protein, 19 aa, Artificial Sequence
  Synthetic construct; antibody chain
ESKYGPPCPPCPAPEFLGG

SEQ ID NO: 181 - protein, 13 aa, Artificial Sequence
  Synthetic construct; antibody chain
ESKYGPPCPPCPA

SEQ ID NO: 182 - protein, 13 aa, Artificial Sequence
  Synthetic construct; antibody chain
ESKYGPPCPSCPA

SEQ ID NO: 183 - protein, 24 aa, Artificial Sequence
  Synthetic construct; antibody chain
ESKYGPPCPSCPAPEFLGGPSVFL

SEQ ID NO: 184 - protein, 24 aa, Artificial Sequence
  Synthetic construct; antibody chain
ESKYGPPCPPCPAPEFLGGPSVFL

SEQ ID NO: 185 - protein, 18 aa, Artificial Sequence
  Synthetic construct; antibody chain
ERKCCVECPPCPAPPVAG

SEQ ID NO: 186 - protein, 13 aa, Artificial Sequence
  Synthetic construct; antibody chain
ERKCCVECPPCPA

SEQ ID NO: 187 - protein, 247 aa, Artificial Sequence
  Synthetic construct; antibody chain
  misc (227)..(230): can be present or absent from the peptide
  misc (230)..(230): Xaa can be threonine or lysine
  misc (231)..(236): can be present or absent from the peptide
  misc (237)..(247): can be present or absent from the peptide
EVQLVQSGAEVKKPGESLKISCKVSGYDFSKYWIGWVRQMPGKGLEWMGLIYPGDSDTRYSPSLEGQVSISADKSISAAYLQFSSLKASDSAMYYCVRKGYSAYLGGWFDPWGQGTLVTVSSASTKGPSVFPLAPSSKSTSGGTAALGCLVKDYFPEPVTVSWNSGALTSGVHTFPAVLQSSGLYSLSSVVTVPSSSLGTQTYICNVNHKPSNTKVDKRVEPKSCDKTHXCPPCPAPELLGGPSVFL

SEQ ID NO: 188 - protein, 220 aa, Artificial Sequence
  Synthetic construct; antibody chain
DIQLTQSPDSLAASLGERVTINCRSSQNIFYNSNNKNFLAWYQQKAGQSPKLLIYWASTRESGVPDRFSGSGSGTDFTLTISGLQAGDVAVYFCQQYFTDAPTFGGGTKVEIKRTVAAPSVFIFPPSDEQLKSGTASVVCLLNNFYPREAKVQWKVDNALQSGNSQESVTEQDSKDSTYSLSSTLTLSKADYEKHKVYACEVTHQGLSSPVTKSFNRGEC

SEQ ID NO: 189 - protein, 251 aa, Artificial Sequence
  Synthetic construct; antibody chain
  misc (231)..(234): can be present or absent from peptide
  misc (234)..(234): Xaa can be threonine or lysine
  misc (235)..(240): can be present or absent from peptide
  misc (241)..(251): can be present or absent from peptide
EVQLLQSGGGVVQPGGSLRLSCEASGFTFSSYSMHWVRQAPGKGLEWLTLISYNGVNKYYAKSVKGRFAISRDDSKSTLFLQMNSLTTDDTAVYYCARCPIPRAASYRNGDNYFEFGQGTLVTVSSASTKGPSVFPLAPSSKSTSGGTAALGCLVKDYFPEPVTVSWNSGALTSGVHTFPAVLQSSGLYSLSSVVTVPSSSLGTQTYICNVNHKPSNTKVDKRVEPKSCDKTHXCPPCPAPELLGGPSVFL

SEQ ID NO: 190 - protein, 215 aa, Artificial Sequence
  Synthetic construct; antibody chain
QAVVTQEPSLSVSPGGTVTLTCALSSASVSTSSYPSWYQQTPGQPPRMLIHNTDTRSSGVPDRFSGSILGKKAALTITGAQADDESDYYCVVYLGNGFWVFGGGTKLTVLGQPKAAPSVTLFPPSSEELQANKATLVCLISDFYPGAVTVAWKADSSPVKAGVETTTPSKQSNNKYAASSYLSLTPEQWKSHRSYSCQVTHEGSTVEKTVAPTCS

SEQ ID NO: 191 - protein, 241 aa, Artificial Sequence
  Synthetic construct; antibody chain
  MISC (221)..(224): can be present or absent from peptide
  MISC (224)..(224): Xaa can be threonine or lysine
  MISC (225)..(230): can be present or absent from peptide
  MISC (231)..(241): can be present or absent from peptide
EVQLVESGGGLVQPGGSLRLSCAASGFTFSIYTMSWVRQAPGKGLEWVSAILSDGSTYYADSVEGRFTISRDNSKTTLYLQMNSLTAEDTAVYYCTKRVEGSFRGWGQGTLVTVSSASTKGPSVFPLAPSSKSTSGGTAALGCLVKDYFPEPVTVSWNSGALTSGVHTFPAVLQSSGLYSLSSVVTVPSSSLGTQTYICNVNHKPSNTKVDKRVEPKSCDKTHXCPPCPAPELLGGPSVFL

SEQ ID NO: 192 - protein, 216 aa, Artificial Sequence
  Synthetic construct; antibody chain
EIVMTQSPGTLSLSPGESATLSCRASQSVSTTYLAWYQQKPGQAPRLLIYGASSRATGIPDRFSGSGSGTDFTLTISRLEPEDFAVYYCQQYGGSRLITFGQGTRLEIKRTVAAPSVFIFPPSDEQLKSGTASVVCLLNNFYPREAKVQWKVDNALQSGNSQESVTEQDSKDSTYSLSSTLTLSKADYEKHKVYACEVTHQGLSSPVTKSFNRGEC

SEQ ID NO: 193 - protein, 98 aa, Artificial Sequence
  Synthetic construct; antibody chain
ASTKGPSVFPLAPSSKSTSGGTAALGCLVKDYFPEPVTVSWNSGALTSGVHTFPAVLQSSGLYSLSSVVTVPSSSLGTQTYICNVNHKPSNTKVDKRV

SEQ ID NO: 194 - protein, 98 aa, Artificial Sequence
  Synthetic construct; antibody chain
ASTKGPSVFPLAPCSRSTSESTAALGCLVKDYFPEPVTVSWNSGALTSGVHTFPAVLQSSGLYSLSSVVTVPSSNFGTQTYTCNVDHKPSNTKVDKTV

SEQ ID NO: 195 - protein, 98 aa, Artificial Sequence
  Synthetic construct; antibody chain
ASTKGPSVFPLAPCSRSTSESTAALGCLVKDYFPEPVTVSWNSGALTSGVHTFPAVLQSSGLYSLSSVVTVPSSSLGTKTYTCNVDHKPSNTKVDKRV

SEQ ID NO: 196 - protein, 205 aa, Artificial Sequence
  Synthetic construct; antibody chain
FPPKPKDTLMISRTPEVTCVVVDVSHEDPEVKFNWYVDGVEVHNAKTKPREEQYNSTYRVVSVLTVLHQDWLNGKEYKCKVSNKALPAPIEKTISKAKGQPREPQVYTLPPSREEMTKNQVSLTCLVKGFYPSDIAVEWESNGQPENNYKTTPPVLDSDGSFFLYSKLTVDKSRWQQGNVFSCSVMHEALHNHYTQKSLSLSPGK

SEQ ID NO: 197 - protein, 205 aa, Artificial Sequence
  Synthetic construct; antibody chain
FPPKPKDTLMISRTPEVTCVVVDVSHEDPEVQFNWYVDGVEVHNAKTKPREEQFNSTFRVVSVLTVVHQDWLNGKEYKCKVSNKGLPAPIEKTISKTKGQPREPQVYTLPPSREEMTKNQVSLTCLVKGFYPSDISVEWESNGQPENNYKTTPPMLDSDGSFFLYSKLTVDKSRWQQGNVFSCSVMHEALHNHYTQKSLSLSPGK

SEQ ID NO: 198 - protein, 205 aa, Artificial Sequence
  Synthetic construct; antibody chain
FPPKPKDTLMISRTPEVTCVVVDVSQEDPEVQFNWYVDGVEVHNAKTKPREEQFNSTYRVVSVLTVLHQDWLNGKEYKCKVSNKGLPSSIEKTISKAKGQPREPQVYTLPPSQEEMTKNQVSLTCLVKGFYPSDIAVEWESNGQPENNYKTTPPVLDSDGSFFLYSRLTVDKSRWQEGNVFSCSVMHEALHNHYTQKSLSLSLGK

SEQ ID NO: 199 - protein, 106 aa, Artificial Sequence [sequence omitted]

SEQ ID NO: 200 - protein, 107 aa, Artificial Sequence
  Synthetic construct; antibody chain
GQPREPQVYTLPPSREEMTKNQVSLTCLVKGFYPSDISVEWESNGQPENNYKTTPPMLDSDGSFFLYSKLTVDKSRWQQGNVFSCSVMHEALHNHYTQKSLSLSPGK

SEQ ID NO: 201 - protein, 106 aa, Artificial Sequence
  Synthetic construct; antibody chain
QPREPQVYTLPPSQEEMTKNQVSLTCLVKGFYPSDIAVEWESNGQPENNYKTTPPVLDSDGSFFLYSRLTVDKSRWQEGNVFSCSVMHEALHNHYTQKSLSLSLGK

SEQ ID NO: 202 - protein, 6 aa, Artificial Sequence
  Synthetic construct; hinge region
CPPCPA

SEQ ID NO: 203 - protein, 5 aa, Artificial Sequence
  Synthetic construct; hinge region
CPPCP

SEQ ID NO: 204 - protein, 5 aa, Artificial Sequence
  Synthetic construct; hinge region
CPPCA

SEQ ID NO: 205 - protein, 22 aa, Artificial Sequence
  Synthetic construct; hinge region
EPKSCDKTHTCPPCPAPEAAGG

SEQ ID NO: 206 - protein, 27 aa, Artificial Sequence
  Synthetic construct; hinge region
EPKSCDKTHTCPPCPAPEAAGGPSVFL

SEQ ID NO: 207 - protein, 27 aa, Artificial Sequence
  Synthetic construct; hinge region
EPKSCDKTHLCPPCPAPEAAGGPSVFL

SEQ ID NO: 208 - protein, 18 aa, Artificial Sequence
  Synthetic construct; hinge region
ERKSCVECPPCPAPPVAG

SEQ ID NO: 209 - protein, 13 aa, Artificial Sequence
  Synthetic construct; hinge region
ERKSCVECPPCPA

SEQ ID NO: 210 - protein, 19 aa, Artificial Sequence
  Synthetic construct; hinge region
ESKYGPPCPSCPAPEFLGG

SEQ ID NO: 211 - protein, 22 aa, Artificial Sequence
  Synthetic construct; hinge region
EPKSCDKTHTCPPCPAPELAGA

SEQ ID NO: 212 - protein, 27 aa, Artificial Sequence
  Synthetic construct; hinge region
EPKSCDKTHTCPPCPAPELAGAPSVFL

SEQ ID NO: 213 - protein, 27 aa, Artificial Sequence
  Synthetic construct; hinge region
EPKSCDKTHLCPPCPAPELAGAPSVFL

SEQ ID NO: 214 - protein, 22 aa, Artificial Sequence
  Synthetic construct; hinge region
EPKSCDKTHTCPPCPAPEFEGG

SEQ ID NO: 215 - protein, 27 aa, Artificial Sequence
  Synthetic construct; hinge region
EPKSCDKTHTCPPCPAPEFEGGPSVFL

SEQ ID NO: 216 - protein, 27 aa, Artificial Sequence
  Synthetic construct; hinge region
EPKSCDKTHLCPPCPAPEFEGGPSVFL

SEQ ID NO: 217 - DNA, 82 bp, Artificial Sequence
  synthetic construct; intron sequence
gtgagtatctcagggatccagacatggggatatgggaggtgcctctgatcccagggctcactgtgggtctctctgttcacag

SEQ ID NO: 218 - DNA, 97 bp, Artificial Sequence
  synthetic construct; intron sequence
gtaagtttagtctttttgtcttttatttcaggtcccggatccggtggtggtgcaaatcaaagaactgctcctcagtggatgttgcctttacttctag

SEQ ID NO: 219 - protein, 743 aa, Artificial Sequence
  synthetic construct; AAV capsid
MAADGYLPDWLEDNLSEGIREWWALKPGAPQPKANQQHQDNARGLVLPGYKYLGPGNGLDKGEPVNAADAAALEHDKAYDQQLKAGDNPYLKYNHADAEFQERLKEDTSFGGNLGRAVFQAKKRLLEPLGLVEEAAKTAPGKKRPVEQSPQEPDSSAGIGKSGAQPAKKRLNFGQTGDTESVPDPQPIGEPPAAPSGVGSLTMASGGGAPVADNNEGADGVGSSSGNWHCDSQWLGDRVITTSTRTWALPTYNNHLYKQISNSTSGGSSNDNAYFGYSTPWGYFDFNRFHCHFSPRDWQRLINNNWGFRPKRLNFKLFNIQVKEVTDNNGVKTIANNLTSTVQVFTDSDYQLPYVLGSAHEGCLPPFPADVFMIPQYGYLTLNDGSQAVGRSSFYCLEYFPSQMLRTGNNFQFSYEFENVPFHSSYAHSQSLDRLMNPLIDQYLYYLSRTINGSGQNQQTLKFSVAGPSNMAVQGRNYIPGPSYRQQRVSTTVTQNNNSEFAWPGASSWALNGRNSLMNPGPAMASHKEGEDRFFPLSGSLIFGKQGTGRDNVDADKVMITNEEEIKTTNPVATESYGQVATNHQSDGTLAVPFKAQAQTGWVQNQGILPGMVWQDRDVYLQGPIWAKIPHTDGNFHPSPLMGGFGMKHPPPQILIKNTPVPADPPTAFNKDKLNSFITQYSTGQVSVEIEWELQKENSKRWNPEIQYTSNYYKSNNVEFAVNTEGVYSEPRPIGTRYLTRNL

SEQ ID NO: 220 - protein, 743 aa, Artificial Sequence
  synthetic construct; AAV capsid
MAADGYLPDWLEDNLSEGIREWWALKPGAPQPKANQQHQDNARGLVLPGYKYLGPGNGLDKGEPVNAADAAALEHDKAYDQQLKAGDNPYLKYNHADAEFQERLKEDTSFGGNLGRAVFQAKKRLLEPLGLVEEAAKTAPGKKRPVEQSPQEPDSSAGIGKSGAQPAKKRLNFGQTGDTESVPDPQPIGEPPAAPSGVGSLTMASGGGAPVADNNEGADGVGSSSGNWHCDSQWLGDRVITTSTRTWALPTYNNHLYKQISNSTSGGSSNDNAYFGYSTPWGYFDFNRFHCHFSPRDWQRLINNNWGFRPKRLNFKLFNIQVKEVTDNNGVKTIANNLTSTVQVFTDSDYQLPYVLGSAHEGCLPPFPADVFMIPQYGYLTLNDGSQAVGRSSFYCLEYFPSQMLRTGNNFQFSYEFENVPFHSSYAHSQSLDRLMNPLIDQYLYYLSRTINGSGQNQQTLKFSVAGPSNMAVQGRNYIPGPSYRQQRVSTTVTQNNNSEFAWPGASSWALNGRNSLMNPGPAMASHKEGEDRFFPLSGSLIFGKQGTGRDNVDADKVMITNEEEIKTTNPVATESYGQVATNHQSAQTLAVPFKAQAQTGWVQNQGILPGMVWQDRDVYLQGPIWAKIPHTDGNFHPSPLMGGFGMKHPPPQILIKNTPVPADPPTAFNKDKLNSFITQYSTGQVSVEIEWELQKENSKRWNPEIQYTSNYYKSNNVEFAVNTEGVYSEPRPIGTRYLTRNL

SEQ ID NO: 221 - protein, 743 aa, Artificial Sequence
  synthetic construct; AAV capsid
MAADGYLPDWLEDNLSEGIREWWALKPGAPQPKANQQHQDNARGLVLPGYKYLGPGNGLDKGEPVNAADAAALEHDKAYDQQLKAGDNPYLKYNHADAEFQERLKEDTSFGGNLGRAVFQAKKRLLEPLGLVEEAAKTAPGKKRPVEQSPQEPDSSAGIGKSGAQPAKKRLNFGQTGDTESVPDPQPIGEPPAAPSGVGSLTMASGGGAPVADNNEGADGVGSSSGNWHCDSQWLGDRVITTSTRTWALPTYNNHLYKQISNSTSGGSSNDNAYFGYSTPWGYFDFNRFHCHFSPRDWQRLINNNWGFRPKRLNFKLFNIQVKEVTDNNGVKTIANNLTSTVQVFTDSDYQLPYVLGSAHEGCLPPFPADVFMIPQYGYLTLNDGSQAVGRSSFYCLEYFPSQMLRTGNNFQFSYEFENVPFHSSYAHSQSLDRLMNPLIDQYLYYLSKTINGSGQNQQTLKFSVAGPSNMAVQGRNYIPGPSYRQQRVSTTVTQNNNSEFAWPGASSWALNGRNSLMNPGPAMASHKEGEDRFFPLSGSLIFGKQGTGRDNVDADKVMITNEEEIKTTNPVATESYGQVATNHQSDGTLAVPFKAQAQTGWVQNQGILPGMVWQDRDVYLQGPIWAKIPHTDGNFHPSPLMGGFGMKHPPPQILIKNTPVPADPPTAFNKDKLNSFITQYSTGQVSVEIEWELQKENSKRWNPEIQYTSNYYKSNNVEFAVNTEGVYSEPRPIGTRYLTRNL

SEQ ID NO: 222 - protein, 743 aa, Artificial Sequence
  synthetic construct; AAV capsid
MAADGYLPDWLEDNLSEGIREWWALKPGAPQPKANQQHQDNARGLVLPGYKYLGPGNGLDKGEPVNAADAAALEHDKAYDQQLKAGDNPYLKYNHADAEFQERLKEDTSFGGNLGRAVFQAKKRLLEPLGLVEEAAKTAPGKKRPVEQSPQEPDSSAGIGKSGAQPAKKRLNFGQTGDTESVPDPQPIGEPPAAPSGVGSLTMASGGGAPVADNNEGADGVGSSSGNWHCDSQWLGDRVITTSTRTWALPTYNNHLYKQISNSTSGGSSNDNAYFGYSTPWGYFDFNRFHCHFSPRDWQRLINNNWGFRPKRLNFKLFNIQVKEVTDNNGVKTIANNLTSTVQVFTDSDYQLPYVLGSAHEGCLPPFPADVFMIPQYGYLTLNDGSQAVGRSSFYCLEYFPSQMLRTGNNFQFSYEFENVPFHSSYAHSQSLDRLMNPLIDQYLYYLSKTINGSGQNQQTLKFSVAGPSNMAVQGRNYIPGPSYRQQRVSTTVTQNNNSEFAWPGASSWALNGRNSLMNPGPAMASHKEGEDRFFPLSGSLIFGKQGTGRDNVDADKVMITNEEEIKTTNPVATESYGQVATNHQSAQTLAVPFKAQAQTGWVQNQGILPGMVWQDRDVYLQGPIWAKIPHTDGNFHPSPLMGGFGMKHPPPQILIKNTPVPADPPTAFNKDKLNSFITQYSTGQVSVEIEWELQKENSKRWNPEIQYTSNYYKSNNVEFAVNTEGVYSEPRPIGTRYLTRNL

SEQ ID NO: 223 - protein, 743 aa, Artificial Sequence
  synthetic construct; AAV capsid
MAADGYLPDWLEDNLSEGIREWWALKPGAPQPKANQQHQDNARGLVLPGYKYLGPGNGLDKGEPVNAADAAALEHDKAYDQQLKAGDNPYLKYNHADAEFQERLKEDTSFGGNLGRAVFQAKKRLLEPLGLVEEAAKTAPGKKRPVEQSPQEPDSSAGIGKSGAQPAKKRLNFGQTGDTESVPDPQPIGEPPAAPSGVGSLTMASGGGAPVADNNEGADGVGSSSGNWHCDSQWLGDRVITTSTRTWALPTYNNHLYKQISNSTSGGSSNDNAYFGYSTPWGYFDFNRFHCHFSPRDWQRLINNNWGFRPKRLNFKLFNIQVKEVTDNNGVKTIANNLTSTVQVFTDSDYQLPYVLGSAHEGCLPPFPADVFMIPQYGYLTLNDGSQAVGRSSFYCLEYFPSQMLRTGNNFQFSYEFENVPFHSSYAHSQSLDRLMNPLIDQYLYYLSRTINGSGQNQQTLKFSVAGPSNMAVQGRNYIPGPSYRQQRVSTTVTQNNNSEFAWPGASSWALNGRNSLMNPGPAMASHKEGEDRFFPLSGSLIFGKQGTGRDNVDADKVMITNEEEIKTTNPVATESYGQVATNHQSESTLAVPFKAQAQTGWVQNQGILPGMVWQDRDVYLQGPIWAKIPHTDGNFHPSPLMGGFGMKHPPPQILIKNTPVPADPPTAFNKDKLNSFITQYSTGQVSVEIEWELQKENSKRWNPEIQYTSNYYKSNNVEFAVNTEGVYSEPRPIGTRYLTRNL

SEQ ID NO: 224 - protein, 743 aa, Artificial Sequence
  synthetic construct; AAV capsid
MAADGYLPDWLEDNLSEGIREWWALKPGAPQPKANQQHQDNARGLVLPGYKYLGPGNGLDKGEPVNAADAAALEHDKAYDQQLKAGDNPYLKYNHADAEFQERLKEDTSFGGNLGRAVFQAKKRLLEPLGLVEEAAKTAPGKKRPVEQSPQEPDSSAGIGKSGAQPAKKRLNFGQTGDTESVPDPQPIGEPPAAPSGVGSLTMASGGGAPVADNNEGADGVGSSSGNWHCDSQWLGDRVITTSTRTWALPTYNNHLYKQISNSTSGGSSNDNAYFGYSTPWGYFDFNRFHCHFSPRDWQRLINNNWGFRPKRLNFKLFNIQVKEVTDNNGVKTIANNLTSTVQVFTDSDYQLPYVLGSAHEGCLPPFPADVFMIPQYGYLTLNDGSQAVGRSSFYCLEYFPSQMLRTGNNFQFSYEFENVPFHSSYAHSQSLDRLMNPLIDQYLYYLSRTINGSGQNQQTLKFSVAGPSNMAVQGRNYIPGPSYRQQRVSTTVTQNNNSEFAWPGASSWALNGRNSLMNPGPAMASHKEGEDRFFPLSGSLIFGKQGTGRDNVDADKVMITNEEEIKTTNPVATESYGQVATNHQSGGTLAVPFKAQAQTGWVQNQGILPGMVWQDRDVYLQGPIWAKIPHTDGNFHPSPLMGGFGMKHPPPQILIKNTPVPADPPTAFNKDKLNSFITQYSTGQVSVEIEWELQKENSKRWNPEIQYTSNYYKSNNVEFAVNTEGVYSEPRPIGTRYLTRNL

SEQ ID NO: 225 - protein, 743 aa, Artificial Sequence
  synthetic construct; AAV capsid
MAADGYLPDWLEDNLSEGIREWWALKPGAPQPKANQQHQDNARGLVLPGYKYLGPGNGLDKGEPVNAADAAALEHDKAYDQQLKAGDNPYLKYNHADAEFQERLKEDTSFGGNLGRAVFQAKKRLLEPLGLVEEAAKTAPGKKRPVEQSPQEPDSSAGIGKSGAQPAKKRLNFGQTGDTESVPDPQPIGEPPAAPSGVGSLTMASGGGAPVADNNEGADGVGSSSGNWHCDSQWLGDRVITTSTRTWALPTYNNHLYKQISNSTSGGSSNDNAYFGYSTPWGYFDFNRFHCHFSPRDWQRLINNNWGFRPKRLNFKLFNIQVKEVTDNNGVKTIANNLTSTVQVFTDSDYQLPYVLGSAHEGCLPPFPADVFMIPQYGYLTLNDGSQAVGRSSFYCLEYFPSQMLRTGNNFQFSYEFENVPFHSSYAHSQSLDRLMNPLIDQYLYYLSRTINGSGQNQQTLKFSVAGPSNMAVQGRNYIPGPSYRQQRVSTTVTQNNNSEFAWPGASSWALNGRNSLMNPGPAMASHKEGEDRFFPLSGSLIFGKQGTGRDNVDADKVMITNEEEIKTTNPVATESYGQVATNHQSDGTLATPFKAQAQTGWVQNQGILPGMVWQDRDVYLQGPIWAKIPHTDGNFHPSPLMGGFGMKHPPPQILIKNTPVPADPPTAFNKDKLNSFITQYSTGQVSVEIEWELQKENSKRWNPEIQYTSNYYKSNNVEFAVNTEGVYSEPRPIGTRYLTRNL

SEQ ID NO: 226 - protein, 10 aa, Artificial Sequence
  synthetic construct; linker
GGGGSGGGGS

SEQ ID NO: 227 - protein, 15 aa, Artificial Sequence
  synthetic construct; linker
GGGGSGGGGSGGGGS

SEQ ID NO: 228 - protein, 20 aa, Artificial Sequence
  synthetic construct; linker
GGGGSGGGGSGGGGSGGGGS

SEQ ID NO: 229 - protein, 16 aa, Artificial Sequence
  synthetic construct; hinge
EPRGPTIKPCPPCKCP

SEQ ID NO: 230 - protein, 21 aa, Artificial Sequence
  synthetic construct; hinge region
GGGGGEPRGPTIKPCPPCKCP

SEQ ID NO: 231 - protein, 25 aa, Artificial Sequence
  synthetic construct; hinge
GGGGGGGGGEPRGPTIKPCPPCKCP

SEQ ID NO: 232 - protein, 217 aa, Artificial Sequence
  synthetic construct; IgG construct
APNLLGGPSVFIFPPKIKDVLMISLSPIVTCVVVDVSEDDPDVQISWFVNNVEVHTAQTQTHREDYNSTLRVVSALPIQHQDWMSGKEFKCKVNNKDLPAPIERTISKPKGSVRAPQVYVLPPPEEEMTKKQVTLTCMVTDFMPEDIYVEWTNNGKTELNYKNTEPVLDSDGSYFMYSKLRVEKKNWVERNSYSCSVVHEGLHNHHTTKSFSRTPGK

SEQ ID NO: 233 - protein, 217 aa, Artificial Sequence
  synthetic construct; IgG construct
APNAAGGPSVFIFPPKIKDVLMISLSPIVTCVVVDVSEDDPDVQISWFVNNVEVHTAQTQTHREDYNSTLRVVSALPIQHQDWMSGKEFKCKVNNKDLGAPIERTISKPKGSVRAPQVYVLPPPEEEMTKKQVTLTCMVTDFMPEDIYVEWTNNGKTELNYKNTEPVLDSDGSYFMYSKLRVEKKNWVERNSYSCSVVHEGLHNHHTTKSFSRTPGK

SEQ ID NO: 234 - protein, 478 aa, Artificial Sequence
  synthetic construct; scFv construct
EVQLVQSGAEVKKPGESLKISCKVSGYDFSKYWIGWVRQMPGKGLEWMGLIYPGDSDTRYSPSLEGQVSISADKSISAAYLQFSSLKASDSAMYYCVRKGYSAYLGGWFDPWGQGTLVTVSSGGGGSGGGGSDIQLTQSPDSLAASLGERVTINCRSSQNIFYNSNNKNFLAWYQQKAGQSPKLLIYWASTRESGVPDRFSGSGSGTDFTLTISGLQAGDVAVYFCQQYFTDAPTFGGGTKVEIKEPRGPTIKPCPPCKCPAPNLLGGPSVFIFPPKIKDVLMISLSPIVTCVVVDVSEDDPDVQISWFVNNVEVHTAQTQTHREDYNSTLRVVSALPIQHQDWMSGKEFKCKVNNKDLPAPIERTISKPKGSVRAPQVYVLPPPEEEMTKKQVTLTCMVTDFMPEDIYVEWTNNGKTELNYKNTEPVLDSDGSYFMYSKLRVEKKNWVERNSYSCSVVHEGLHNHHTTKSFSRTPGK

SEQ ID NO: 235 - protein, 474 aa, Artificial Sequence
  synthetic construct; scFv construct
EVQLVQSGAEVKKPGESLKISCKVSGYDFSKYWIGWVRQMPGKGLEWMGLIYPGDSDTRYSPSLEGQVSISADKSISAAYLQFSSLKASDSAMYYCVRKGYSAYLGGWFDPWGQGTLVTVSSGGGGSGGGGSDIQLTQSPDSLAASLGERVTINCRSSQNIFYNSNNKNFLAWYQQKAGQSPKLLIYWASTRESGVPDRFSGSGSGTDFTLTISGLQAGDVAVYFCQQYFTDAPTFGGGTKVEIKESKYGPPCPSCPAPEFLGGPSVFLFPPKPKDTLMISRTPEVTCVVVDVSQEDPEVQFNWYVDGVEVHNAKTKPREEQFNSTYRVVSVLTVLHQDWLNGKEYKCKVSNKGLPSSIEKTISKAKGQPREPQVYTLPPSQEEMTKNQVSLTCLVKGFYPSDIAVEWESNGQPENNYKTTPPVLDSDGSFFLYSRLTVDKSRWQEGNVFSCSVMHEALHNHYTQKSLSLSLGK

SEQ ID NO: 236 - protein, 483 aa, Artificial Sequence
  synthetic construct; scFv construct
EVQLVQSGAEVKKPGESLKISCKVSGYDFSKYWIGWVRQMPGKGLEWMGLIYPGDSDTRYSPSLEGQVSISADKSISAAYLQFSSLKASDSAMYYCVRKGYSAYLGGWFDPWGQGTLVTVSSGGGGSGGGGSDIQLTQSPDSLAASLGERVTINCRSSQNIFYNSNNKNFLAWYQQKAGQSPKLLIYWASTRESGVPDRFSGSGSGTDFTLTISGLQAGDVAVYFCQQYFTDAPTFGGGTKVEIKGGGGGEPRGPTIKPCPPCKCPAPNLLGGPSVFIFPPKIKDVLMISLSPIVTCVVVDVSEDDPDVQISWFVNNVEVHTAQTQTHREDYNSTLRVVSALPIQHQDWMSGKEFKCKVNNKDLPAPIERTISKPKGSVRAPQVYVLPPPEEEMTKKQVTLTCMVTDFMPEDIYVEWTNNGKTELNYKNTEPVLDSDGSYFMYSKLRVEKKNWVERNSYSCSVVHEGLHNHHTTKSFSRTPGK

SEQ ID NO: 237 - protein, 479 aa, Artificial Sequence
  synthetic construct; scFv construct
EVQLVQSGAEVKKPGESLKISCKVSGYDFSKYWIGWVRQMPGKGLEWMGLIYPGDSDTRYSPSLEGQVSISADKSISAAYLQFSSLKASDSAMYYCVRKGYSAYLGGWFDPWGQGTLVTVSSGGGGSGGGGSDIQLTQSPDSLAASLGERVTINCRSSQNIFYNSNNKNFLAWYQQKAGQSPKLLIYWASTRESGVPDRFSGSGSGTDFTLTISGLQAGDVAVYFCQQYFTDAPTFGGGTKVEIKGGGGGESKYGPPCPSCPAPEFLGGPSVFLFPPKPKDTLMISRTPEVTCVVVDVSQEDPEVQFNWYVDGVEVHNAKTKPREEQFNSTYRVVSVLTVLHQDWLNGKEYKCKVSNKGLPSSIEKTISKAKGQPREPQVYTLPPSQEEMTKNQVSLTCLVKGFYPSDIAVEWESNGQPENNYKTTPPVLDSDGSFFLYSRLTVDKSRWQEGNVFSCSVMHEALHNHYTQKSLSLSLGK

SEQ ID NO: 238 - protein, 487 aa, Artificial Sequence
  synthetic construct; scFv construct
EVQLVQSGAEVKKPGESLKISCKVSGYDFSKYWIGWVRQMPGKGLEWMGLIYPGDSDTRYSPSLEGQVSISADKSISAAYLQFSSLKASDSAMYYCVRKGYSAYLGGWFDPWGQGTLVTVSSGGGGSGGGGSDIQLTQSPDSLAASLGERVTINCRSSQNIFYNSNNKNFLAWYQQKAGQSPKLLIYWASTRESGVPDRFSGSGSGTDFTLTISGLQAGDVAVYFCQQYFTDAPTFGGGTKVEIKGGGGGGGGGEPRGPTIKPCPPCKCPAPNLLGGPSVFIFPPKIKDVLMISLSPIVTCVVVDVSEDDPDVQISWFVNNVEVHTAQTQTHREDYNSTLRVVSALPIQHQDWMSGKEFKCKVNNKDLPAPIERTISKPKGSVRAPQVYVLPPPEEEMTKKQVTLTCMVTDFMPEDIYVEWTNNGKTELNYKNTEPVLDSDGSYFMYSKLRVEKKNWVERNSYSCSVVHEGLHNHHTTKSFSRTPGK

SEQ ID NO: 239 - protein, 483 aa, Artificial Sequence
  synthetic construct; scFv construct
EVQLVQSGAEVKKPGESLKISCKVSGYDFSKYWIGWVRQMPGKGLEWMGLIYPGDSDTRYSPSLEGQVSISADKSISAAYLQFSSLKASDSAMYYCVRKGYSAYLGGWFDPWGQGTLVTVSSGGGGSGGGGSDIQLTQSPDSLAASLGERVTINCRSSQNIFYNSNNKNFLAWYQQKAGQSPKLLIYWASTRESGVPDRFSGSGSGTDFTLTISGLQAGDVAVYFCQQYFTDAPTFGGGTKVEIKGGGGGGGGGESKYGPPCPSCPAPEFLGGPSVFLFPPKPKDTLMISRTPEVTCVVVDVSQEDPEVQFNWYVDGVEVHNAKTKPREEQFNSTYRVVSVLTVLHQDWLNGKEYKCKVSNKGLPSSIEKTISKAKGQPREPQVYTLPPSQEEMTKNQVSLTCLVKGFYPSDIAVEWESNGQPENNYKTTPPVLDSDGSFFLYSRLTVDKSRWQEGNVFSCSVMHEALHNHYTQKSLSLSLGK

SEQ ID NO: 240 - protein, 483 aa, Artificial Sequence
  synthetic construct; scFv construct
EVQLVQSGAEVKKPGESLKISCKVSGYDFSKYWIGWVRQMPGKGLEWMGLIYPGDSDTRYSPSLEGQVSISADKSISAAYLQFSSLKASDSAMYYCVRKGYSAYLGGWFDPWGQGTLVTVSSGGGGSGGGGSGGGGSDIQLTQSPDSLAASLGERVTINCRSSQNIFYNSNNKNFLAWYQQKAGQSPKLLIYWASTRESGVPDRFSGSGSGTDFTLTISGLQAGDVAVYFCQQYFTDAPTFGGGTKVEIKEPRGPTIKPCPPCKCPAPNLLGGPSVFIFPPKIKDVLMISLSPIVTCVVVDVSEDDPDVQISWFVNNVEVHTAQTQTHREDYNSTLRVVSALPIQHQDWMSGKEFKCKVNNKDLPAPIERTISKPKGSVRAPQVYVLPPPEEEMTKKQVTLTCMVTDFMPEDIYVEWTNNGKTELNYKNTEPVLDSDGSYFMYSKLRVEKKNWVERNSYSCSVVHEGLHNHHTTKSFSRTPGK

SEQ ID NO: 241 - protein, 488 aa, Artificial Sequence
  synthetic construct; scFv construct
EVQLVQSGAEVKKPGESLKISCKVSGYDFSKYWIGWVRQMPGKGLEWMGLIYPGDSDTRYSPSLEGQVSISADKSISAAYLQFSSLKASDSAMYYCVRKGYSAYLGGWFDPWGQGTLVTVSSGGGGSGGGGSGGGGSDIQLTQSPDSLAASLGERVTINCRSSQNIFYNSNNKNFLAWYQQKAGQSPKLLIYWASTRESGVPDRFSGSGSGTDFTLTISGLQAGDVAVYFCQQYFTDAPTFGGGTKVEIKGGGGGEPRGPTIKPCPPCKCPAPNLLGGPSVFIFPPKIKDVLMISLSPIVTCVVVDVSEDDPDVQISWFVNNVEVHTAQTQTHREDYNSTLRVVSALPIQHQDWMSGKEFKCKVNNKDLPAPIERTISKPKGSVRAPQVYVLPPPEEEMTKKQVTLTCMVTDFMPEDIYVEWTNNGKTELNYKNTEPVLDSDGSYFMYSKLRVEKKNWVERNSYSCSVVHEGLHNHHTTKSFSRTPGK

SEQ ID NO: 242 - protein, 492 aa, Artificial Sequence
  synthetic construct; scFv construct
EVQLVQSGAEVKKPGESLKISCKVSGYDFSKYWIGWVRQMPGKGLEWMGLIYPGDSDTRYSPSLEGQVSISADKSISAAYLQFSSLKASDSAMYYCVRKGYSAYLGGWFDPWGQGTLVTVSSGGGGSGGGGSGGGGSDIQLTQSPDSLAASLGERVTINCRSSQNIFYNSNNKNFLAWYQQKAGQSPKLLIYWASTRESGVPDRFSGSGSGTDFTLTISGLQAGDVAVYFCQQYFTDAPTFGGGTKVEIKGGGGGGGGGEPRGPTIKPCPPCKCPAPNLLGGPSVFIFPPKIKDVLMISLSPIVTCVVVDVSEDDPDVQISWFVNNVEVHTAQTQTHREDYNSTLRVVSALPIQHQDWMSGKEFKCKVNNKDLPAPIERTISKPKGSVRAPQVYVLPPPEEEMTKKQVTLTCMVTDFMPEDIYVEWTNNGKTELNYKNTEPVLDSDGSYFMYSKLRVEKKNWVERNSYSCSVVHEGLHNHHTTKSFSRTPGK

SEQ ID NO: 243 - protein, 488 aa, Artificial Sequence
  synthetic construct; scFv construct
EVQLVQSGAEVKKPGESLKISCKVSGYDFSKYWIGWVRQMPGKGLEWMGLIYPGDSDTRYSPSLEGQVSISADKSISAAYLQFSSLKASDSAMYYCVRKGYSAYLGGWFDPWGQGTLVTVSSGGGGSGGGGSGGGGSGGGGSDIQLTQSPDSLAASLGERVTINCRSSQNIFYNSNNKNFLAWYQQKAGQSPKLLIYWASTRESGVPDRFSGSGSGTDFTLTISGLQAGDVAVYFCQQYFTDAPTFGGGTKVEIKEPRGPTIKPCPPCKCPAPNLLGGPSVFIFPPKIKDVLMISLSPIVTCVVVDVSEDDPDVQISWFVNNVEVHTAQTQTHREDYNSTLRVVSALPIQHQDWMSGKEFKCKVNNKDLPAPIERTISKPKGSVRAPQVYVLPPPEEEMTKKQVTLTCMVTDFMPEDIYVEWTNNGKTELNYKNTEPVLDSDGSYFMYSKLRVEKKNWVERNSYSCSVVHEGLHNHHTTKSFSRTPGK

SEQ ID NO: 244 - protein, 493 aa, Artificial Sequence
  synthetic construct; scFv construct
EVQLVQSGAEVKKPGESLKISCKVSGYDFSKYWIGWVRQMPGKGLEWMGLIYPGDSDTRYSPSLEGQVSISADKSISAAYLQFSSLKASDSAMYYCVRKGYSAYLGGWFDPWGQGTLVTVSSGGGGSGGGGSGGGGSGGGGSDIQLTQSPDSLAASLGERVTINCRSSQNIFYNSNNKNFLAWYQQKAGQSPKLLIYWASTRESGVPDRFSGSGSGTDFTLTISGLQAGDVAVYFCQQYFTDAPTFGGGTKVEIKGGGGGEPRGPTIKPCPPCKCPAPNLLGGPSVFIFPPKIKDVLMISLSPIVTCVVVDVSEDDPDVQISWFVNNVEVHTAQTQTHREDYNSTLRVVSALPIQHQDWMSGKEFKCKVNNKDLPAPIERTISKPKGSVRAPQVYVLPPPEEEMTKKQVTLTCMVTDFMPEDIYVEWTNNGKTELNYKNTEPVLDSDGSYFMYSKLRVEKKNWVERNSYSCSVVHEGLHNHHTTKSFSRTPGK

SEQ ID NO: 245 - protein, 497 aa, Artificial Sequence
  synthetic construct; scFv construct
EVQLVQSGAEVKKPGESLKISCKVSGYDFSKYWIGWVRQMPGKGLEWMGLIYPGDSDTRYSPSLEGQVSISADKSISAAYLQFSSLKASDSAMYYCVRKGYSAYLGGWFDPWGQGTLVTVSSGGGGSGGGGSGGGGSGGGGSDIQLTQSPDSLAASLGERVTINCRSSQNIFYNSNNKNFLAWYQQKAGQSPKLLIYWASTRESGVPDRFSGSGSGTDFTLTISGLQAGDVAVYFCQQYFTDAPTFGGGTKVEIKGGGGGGGGGEPRGPTIKPCPPCKCPAPNLLGGPSVFIFPPKIKDVLMISLSPIVTCVVVDVSEDDPDVQISWFVNNVEVHTAQTQTHREDYNSTLRVVSALPIQHQDWMSGKEFKCKVNNKDLPAPIERTISKPKGSVRAPQVYVLPPPEEEMTKKQVTLTCMVTDFMPEDIYVEWTNNGKTELNYKNTEPVLDSDGSYFMYSKLRVEKKNWVERNSYSCSVVHEGLHNHHTTKSFSRTPGK

SEQ ID NO: 246 - protein, 469 aa, Artificial Sequence
  synthetic construct; scFv construct
DIQLTQSPDSLAASLGERVTINCRSSQNIFYNSNNKNFLAWYQQKAGQSPKLLIYWASTRESGVPDRFSGSGSGTDFTLTISGLQAGDVAVYFCQQYFTDAPTFGGGTKVEIKGGGGSGGGGSDIQLTQSPDSLAASLGERVTINCRSSQNIFYNSNNKNFLAWYQQKAGQSPKLLIYWASTRESGVPDRFSGSGSGTDFTLTISGLQAGDVAVYFCQQYFTDAPTFGGGTKVEIKEPRGPTIKPCPPCKCPAPNLLGGPSVFIFPPKIKDVLMISLSPIVTCVVVDVSEDDPDVQISWFVNNVEVHTAQTQTHREDYNSTLRVVSALPIQHQDWMSGKEFKCKVNNKDLPAPIERTISKPKGSVRAPQVYVLPPPEEEMTKKQVTLTCMVTDFMPEDIYVEWTNNGKTELNYKNTEPVLDSDGSYFMYSKLRVEKKNWVERNSYSCSVVHEGLHNHHTTKSFSRTPGK

SEQ ID NO: 247 - protein, 474 aa, Artificial Sequence
  synthetic construct; scFv construct
DIQLTQSPDSLAASLGERVTINCRSSQNIFYNSNNKNFLAWYQQKAGQSPKLLIYWASTRESGVPDRFSGSGSGTDFTLTISGLQAGDVAVYFCQQYFTDAPTFGGGTKVEIKGGGGSGGGGSDIQLTQSPDSLAASLGERVTINCRSSQNIFYNSNNKNFLAWYQQKAGQSPKLLIYWASTRESGVPDRFSGSGSGTDFTLTISGLQAGDVAVYFCQQYFTDAPTFGGGTKVEIKGGGGGEPRGPTIKPCPPCKCPAPNLLGGPSVFIFPPKIKDVLMISLSPIVTCVVVDVSEDDPDVQISWFVNNVEVHTAQTQTHREDYNSTLRVVSALPIQHQDWMSGKEFKCKVNNKDLPAPIERTISKPKGSVRAPQVYVLPPPEEEMTKKQVTLTCMVTDFMPEDIYVEWTNNGKTELNYKNTEPVLDSDGSYFMYSKLRVEKKNWVERNSYSCSVVHEGLHNHHTTKSFSRTPGK

SEQ ID NO: 248 - protein, 478 aa, Artificial Sequence
  synthetic construct; scFv construct
DIQLTQSPDSLAASLGERVTINCRSSQNIFYNSNNKNFLAWYQQKAGQSPKLLIYWASTRESGVPDRFSGSGSGTDFTLTISGLQAGDVAVYFCQQYFTDAPTFGGGTKVEIKGGGGSGGGGSDIQLTQSPDSLAASLGERVTINCRSSQNIFYNSNNKNFLAWYQQKAGQSPKLLIYWASTRESGVPDRFSGSGSGTDFTLTISGLQAGDVAVYFCQQYFTDAPTFGGGTKVEIKGGGGGGGGGEPRGPTIKPCPPCKCPAPNLLGGPSVFIFPPKIKDVLMISLSPIVTCVVVDVSEDDPDVQISWFVNNVEVHTAQTQTHREDYNSTLRVVSALPIQHQDWMSGKEFKCKVNNKDLPAPIERTISKPKGSVRAPQVYVLPPPEEEMTKKQVTLTCMVTDFMPEDIYVEWTNNGKTELNYKNTEPVLDSDGSYFMYSKLRVEKKNWVERNSYSCSVVHEGLHNHHTTKSFSRTPGK

SEQ ID NO: 249 - protein, 474 aa, Artificial Sequence
  synthetic construct; scFv construct
DIQLTQSPDSLAASLGERVTINCRSSQNIFYNSNNKNFLAWYQQKAGQSPKLLIYWASTRESGVPDRFSGSGSGTDFTLTISGLQAGDVAVYFCQQYFTDAPTFGGGTKVEIKGGGGSGGGGSGGGGSDIQLTQSPDSLAASLGERVTINCRSSQNIFYNSNNKNFLAWYQQKAGQSPKLLIYWASTRESGVPDRFSGSGSGTDFTLTISGLQAGDVAVYFCQQYFTDAPTFGGGTKVEIKEPRGPTIKPCPPCKCPAPNLLGGPSVFIFPPKIKDVLMISLSPIVTCVVVDVSEDDPDVQISWFVNNVEVHTAQTQTHREDYNSTLRVVSALPIQHQDWMSGKEFKCKVNNKDLPAPIERTISKPKGSVRAPQVYVLPPPEEEMTKKQVTLTCMVTDFMPEDIYVEWTNNGKTELNYKNTEPVLDSDGSYFMYSKLRVEKKNWVERNSYSCSVVHEGLHNHHTTKSFSRTPGK

SEQ ID NO: 250 - protein, 479 aa, Artificial Sequence
  synthetic construct; scFv construct
DIQLTQSPDSLAASLGERVTINCRSSQNIFYNSNNKNFLAWYQQKAGQSPKLLIYWASTRESGVPDRFSGSGSGTDFTLTISGLQAGDVAVYFCQQYFTDAPTFGGGTKVEIKGGGGSGGGGSGGGGSDIQLTQSPDSLAASLGERVTINCRSSQNIFYNSNNKNFLAWYQQKAGQSPKLLIYWASTRESGVPDRFSGSGSGTDFTLTISGLQAGDVAVYFCQQYFTDAPTFGGGTKVEIKGGGGGEPRGPTIKPCPPCKCPAPNLLGGPSVFIFPPKIKDVLMISLSPIVTCVVVDVSEDDPDVQISWFVNNVEVHTAQTQTHREDYNSTLRVVSALPIQHQDWMSGKEFKCKVNNKDLPAPIERTISKPKGSVRAPQVYVLPPPEEEMTKKQVTLTCMVTDFMPEDIYVEWTNNGKTELNYKNTEPVLDSDGSYFMYSKLRVEKKNWVERNSYSCSVVHEGLHNHHTTKSFSRTPGK

SEQ ID NO: 251 - protein, 483 aa, Artificial Sequence
  synthetic construct; scFv construct
DIQLTQSPDSLAASLGERVTINCRSSQNIFYNSNNKNFLAWYQQKAGQSPKLLIYWASTRESGVPDRFSGSGSGTDFTLTISGLQAGDVAVYFCQQYFTDAPTFGGGTKVEIKGGGGSGGGGSGGGGSDIQLTQSPDSLAASLGERVTINCRSSQNIFYNSNNKNFLAWYQQKAGQSPKLLIYWASTRESGVPDRFSGSGSGTDFTLTISGLQAGDVAVYFCQQYFTDAPTFGGGTKVEIKGGGGGGGGGEPRGPTIKPCPPCKCPAPNLLGGPSVFIFPPKIKDVLMISLSPIVTCVVVDVSEDDPDVQISWFVNNVEVHTAQTQTHREDYNSTLRVVSALPIQHQDWMSGKEFKCKVNNKDLPAPIERTISKPKGSVRAPQVYVLPPPEEEMTKKQVTLTCMVTDFMPEDIYVEWTNNGKTELNYKNTEPVLDSDGSYFMYSKLRVEKKNWVERNSYSCSVVHEGLHNHHTTKSFSRTPGK

SEQ ID NO: 252 - protein, 479 aa, Artificial Sequence
  synthetic construct; scFv construct
DIQLTQSPDSLAASLGERVTINCRSSQNIFYNSNNKNFLAWYQQKAGQSPKLLIYWASTRESGVPDRFSGSGSGTDFTLTISGLQAGDVAVYFCQQYFTDAPTFGGGTKVEIKGGGGSGGGGSGGGGSGGGGSDIQLTQSPDSLAASLGERVTINCRSSQNIFYNSNNKNFLAWYQQKAGQSPKLLIYWASTRESGVPDRFSGSGSGTDFTLTISGLQAGDVAVYFCQQYFTDAPTFGGGTKVEIKEPRGPTIKPCPPCKCPAPNLLGGPSVFIFPPKIKDVLMISLSPIVTCVVVDVSEDDPDVQISWFVNNVEVHTAQTQTHREDYNSTLRVVSALPIQHQDWMSGKEFKCKVNNKDLPAPIERTISKPKGSVRAPQVYVLPPPEEEMTKKQVTLTCMVTDFMPEDIYVEWTNNGKTELNYKNTEPVLDSDGSYFMYSKLRVEKKNWVERNSYSCSVVHEGLHNHHTTKSFSRTPGK

SEQ ID NO: 253 - protein, 484 aa, Artificial Sequence
  synthetic construct; scFv construct
DIQLTQSPDSLAASLGERVTINCRSSQNIFYNSNNKNFLAWYQQKAGQSPKLLIYWASTRESGVPDRFSGSGSGTDFTLTISGLQAGDVAVYFCQQYFTDAPTFGGGTKVEIKGGGGSGGGGSGGGGSGGGGSDIQLTQSPDSLAASLGERVTINCRSSQNIFYNSNNKNFLAWYQQKAGQSPKLLIYWASTRESGVPDRFSGSGSGTDFTLTISGLQAGDVAVYFCQQYFTDAPTFGGGTKVEIKGGGGGEPRGPTIKPCPPCKCPAPNLLGGPSVFIFPPKIKDVLMISLSPIVTCVVVDVSEDDPDVQISWFVNNVEVHTAQTQTHREDYNSTLRVVSALPIQHQDWMSGKEFKCKVNNKDLPAPIERTISKPKGSVRAPQVYVLPPPEEEMTKKQVTLTCMVTDFMPEDIYVEWTNNGKTELNYKNTEPVLDSDGSYFMYSKLRVEKKNWVERNSYSCSVVHEGLHNHHTTKSFSRTPGK

SEQ ID NO: 254 - protein, 488 aa, Artificial Sequence
  synthetic construct; scFv construct
DIQLTQSPDSLAASLGERVTINCRSSQNIFYNSNNKNFLAWYQQKAGQSPKLLIYWASTRESGVPDRFSGSGSGTDFTLTISGLQAGDVAVYFCQQYFTDAPTFGGGTKVEIKGGGGSGGGGSGGGGSGGGGSDIQLTQSPDSLAASLGERVTINCRSSQNIFYNSNNKNFLAWYQQKAGQSPKLLIYWASTRESGVPDRFSGSGSGTDFTLTISGLQAGDVAVYFCQQYFTDAPTFGGGTKVEIKGGGGGGGGGEPRGPTIKPCPPCKCPAPNLLGGPSVFIFPPKIKDVLMISLSPIVTCVVVDVSEDDPDVQISWFVNNVEVHTAQTQTHREDYNSTLRVVSALPIQHQDWMSGKEFKCKVNNKDLPAPIERTISKPKGSVRAPQVYVLPPPEEEMTKKQVTLTCMVTDFMPEDIYVEWTNNGKTELNYKNTEPVLDSDGSYFMYSKLRVEKKNWVERNSYSCSVVHEGLHNHHTTKSFSRTPGK

SEQ ID NO: 255 - protein, 479 aa, Artificial Sequence
  synthetic construct; scFv construct
EVQLLQSGGGVVQPGGSLRLSCEASGFTFSSYSMHWVRQAPGKGLEWLTLISYNGVNKYYAKSVKGRFAISRDDSKSTLFLQMNSLTTDDTAVYYCARCPIPRAASYRNGDNYFEFGQGTLVTVSSGGGGSGGGGSQAVVTQEPSLSVSPGGTVTLTCALSSASVSTSSYPSWYQQTPGQPPRMLIHNTDTRSSGVPDRFSGSILGKKAALTITGAQADDESDYYCVVYLGNGFWVFGGGTKLTVLEPRGPTIKPCPPCKCPAPNLLGGPSVFIFPPKIKDVLMISLSPIVTCVVVDVSEDDPDVQISWFVNNVEVHTAQTQTHREDYNSTLRVVSALPIQHQDWMSGKEFKCKVNNKDLPAPIERTISKPKGSVRAPQVYVLPPPEEEMTKKQVTLTCMVTDFMPEDIYVEWTNNGKTELNYKNTEPVLDSDGSYFMYSKLRVEKKNWVERNSYSCSVVHEGLHNHHTTKSFSRTPGK

SEQ ID NO: 256 - protein, 475 aa, Artificial Sequence
  synthetic construct; scFv construct
EVQLLQSGGGVVQPGGSLRLSCEASGFTFSSYSMHWVRQAPGKGLEWLTLISYNGVNKYYAKSVKGRFAISRDDSKSTLFLQMNSLTTDDTAVYYCARCPIPRAASYRNGDNYFEFGQGTLVTVSSGGGGSGGGGSQAVVTQEPSLSVSPGGTVTLTCALSSASVSTSSYPSWYQQTPGQPPRMLIHNTDTRSSGVPDRFSGSILGKKAALTITGAQADDESDYYCVVYLGNGFWVFGGGTKLTVLESKYGPPCPSCPAPEFLGGPSVFLFPPKPKDTLMISRTPEVTCVVVDVSQEDPEVQFNWYVDGVEVHNAKTKPREEQFNSTYRVVSVLTVLHQDWLNGKEYKCKVSNKGLPSSIEKTISKAKGQPREPQVYTLPPSQEEMTKNQVSLTCLVKGFYPSDIAVEWESNGQPENNYKTTPPVLDSDGSFFLYSRLTVDKSRWQEGNVFSCSVMHEALHNHYTQKSLSLSLGK

SEQ ID NO: 257 - protein, 484 aa, Artificial Sequence
  synthetic construct; scFv construct
EVQLLQSGGGVVQPGGSLRLSCEASGFTFSSYSMHWVRQAPGKGLEWLTLISYNGVNKYYAKSVKGRFAISRDDSKSTLFLQMNSLTTDDTAVYYCARCPIPRAASYRNGDNYFEFGQGTLVTVSSGGGGSGGGGSQAVVTQEPSLSVSPGGTVTLTCALSSASVSTSSYPSWYQQTPGQPPRMLIHNTDTRSSGVPDRFSGSILGKKAALTITGAQADDESDYYCVVYLGNGFWVFGGGTKLTVLGGGGGEPRGPTIKPCPPCKCPAPNLLGGPSVFIFPPKIKDVLMISLSPIVTCVVVDVSEDDPDVQISWFVNNVEVHTAQTQTHREDYNSTLRVVSALPIQHQDWMSGKEFKCKVNNKDLPAPIERTISKPKGSVRAPQVYVLPPPEEEMTKKQVTLTCMVTDFMPEDIYVEWTNNGKTELNYKNTEPVLDSDGSYFMYSKLRVEKKNWVERNSYSCSVVHEGLHNHHTTKSFSRTPGK

SEQ ID NO: 258 - protein, 480 aa, Artificial Sequence
  synthetic construct; scFv construct
EVQLLQSGGGVVQPGGSLRLSCEASGFTFSSYSMHWVRQAPGKGLEWLTLISYNGVNKYYAKSVKGRFAISRDDSKSTLFLQMNSLTTDDTAVYYCARCPIPRAASYRNGDNYFEFGQGTLVTVSSGGGGSGGGGSQAVVTQEPSLSVSPGGTVTLTCALSSASVSTSSYPSWYQQTPGQPPRMLIHNTDTRSSGVPDRFSGSILGKKAALTITGAQADDESDYYCVVYLGNGFWVFGGGTKLTVLGGGGGESKYGPPCPSCPAPEFLGGPSVFLFPPKPKDTLMISRTPEVTCVVVDVSQEDPEVQFNWYVDGVEVHNAKTKPREEQFNSTYRVVSVLTVLHQDWLNGKEYKCKVSNKGLPSSIEKTISKAKGQPREPQVYTLPPSQEEMTKNQVSLTCLVKGFYPSDIAVEWESNGQPENNYKTTPPVLDSDGSFFLYSRLTVDKSRWQEGNVFSCSVMHEALHNHYTQKSLSLSLGK

SEQ ID NO: 259 - protein, 488 aa, Artificial Sequence
  synthetic construct; scFv construct
EVQLLQSGGGVVQPGGSLRLSCEASGFTFSSYSMHWVRQAPGKGLEWLTLISYNGVNKYYAKSVKGRFAISRDDSKSTLFLQMNSLTTDDTAVYYCARCPIPRAASYRNGDNYFEFGQGTLVTVSSGGGGSGGGGSQAVVTQEPSLSVSPGGTVTLTCALSSASVSTSSYPSWYQQTPGQPPRMLIHNTDTRSSGVPDRFSGSILGKKAALTITGAQADDESDYYCVVYLGNGFWVFGGGTKLTVLGGGGGGGGGEPRGPTIKPCPPCKCPAPNLLGGPSVFIFPPKIKDVLMISLSPIVTCVVVDVSEDDPDVQISWFVNNVEVHTAQTQTHREDYNSTLRVVSALPIQHQDWMSGKEFKCKVNNKDLPAPIERTISKPKGSVRAPQVYVLPPPEEEMTKKQVTLTCMVTDFMPEDIYVEWTNNGKTELNYKNTEPVLDSDGSYFMYSKLRVEKKNWVERNSYSCSVVHEGLHNHHTTKSFSRTPGK

SEQ ID NO: 260 - protein, 484 aa, Artificial Sequence
  synthetic construct; scFv construct
EVQLLQSGGGVVQPGGSLRLSCEASGFTFSSYSMHWVRQAPGKGLEWLTLISYNGVNKYYAKSVKGRFAISRDDSKSTLFLQMNSLTTDDTAVYYCARCPIPRAASYRNGDNYFEFGQGTLVTVSSGGGGSGGGGSQAVVTQEPSLSVSPGGTVTLTCALSSASVSTSSYPSWYQQTPGQPPRMLIHNTDTRSSGVPDRFSGSILGKKAALTITGAQADDESDYYCVVYLGNGFWVFGGGTKLTVLGGGGGGGGGESKYGPPCPSCPAPEFLGGPSVFLFPPKPKDTLMISRTPEVTCVVVDVSQEDPEVQFNWYVDGVEVHNAKTKPREEQFNSTYRVVSVLTVLHQDWLNGKEYKCKVSNKGLPSSIEKTISKAKGQPREPQVYTLPPSQEEMTKNQVSLTCLVKGFYPSDIAVEWESNGQPENNYKTTPPVLDSDGSFFLYSRLTVDKSRWQEGNVFSCSVMHEALHNHYTQKSLSLSLGK

SEQ ID NO: 261 - protein, 484 aa, Artificial Sequence
  synthetic construct; scFv construct
EVQLLQSGGGVVQPGGSLRLSCEASGFTFSSYSMHWVRQAPGKGLEWLTLISYNGVNKYYAKSVKGRFAISRDDSKSTLFLQMNSLTTDDTAVYYCARCPIPRAASYRNGDNYFEFGQGTLVTVSSGGGGSGGGGSGGGGSQAVVTQEPSLSVSPGGTVTLTCALSSASVSTSSYPSWYQQTPGQPPRMLIHNTDTRSSGVPDRFSGSILGKKAALTITGAQADDESDYYCVVYLGNGFWVFGGGTKLTVLEPRGPTIKPCPPCKCPAPNLLGGPSVFIFPPKIKDVLMISLSPIVTCVVVDVSEDDPDVQISWFVNNVEVHTAQTQTHREDYNSTLRVVSALPIQHQDWMSGKEFKCKVNNKDLPAPIERTISKPKGSVRAPQVYVLPPPEEEMTKKQVTLTCMVTDFMPEDIYVEWTNNGKTELNYKNTEPVLDSDGSYFMYSKLRVEKKNWVERNSYSCSVVHEGLHNHHTTKSFSRTPGK

SEQ ID NO: 262 - protein, 489 aa, Artificial Sequence
  synthetic construct; scFv construct
EVQLLQSGGGVVQPGGSLRLSCEASGFTFSSYSMHWVRQAPGKGLEWLTLISYNGVNKYYAKSVKGRFAISRDDSKSTLFLQMNSLTTDDTAVYYCARCPIPRAASYRNGDNYFEFGQGTLVTVSSGGGGSGGGGSGGGGSQAVVTQEPSLSVSPGGTVTLTCALSSASVSTSSYPSWYQQTPGQPPRMLIHNTDTRSSGVPDRFSGSILGKKAALTITGAQADDESDYYCVVYLGNGFWVFGGGTKLTVLGGGGGEPRGPTIKPCPPCKCPAPNLLGGPSVFIFPPKIKDVLMISLSPIVTCVVVDVSEDDPDVQISWFVNNVEVHTAQTQTHREDYNSTLRVVSALPIQHQDWMSGKEFKCKVNNKDLPAPIERTISKPKGSVRAPQVYVLPPPEEEMTKKQVTLTCMVTDFMPEDIYVEWTNNGKTELNYKNTEPVLDSDGSYFMYSKLRVEKKNWVERNSYSCSVVHEGLHNHHTTKSFSRTPGK

SEQ ID NO: 263 - protein, 493 aa, Artificial Sequence
  synthetic construct; scFv construct
EVQLLQSGGGVVQPGGSLRLSCEASGFTFSSYSMHWVRQAPGKGLEWLTLISYNGVNKYYAKSVKGRFAISRDDSKSTLFLQMNSLTTDDTAVYYCARCPIPRAASYRNGDNYFEFGQGTLVTVSSGGGGSGGGGSGGGGSQAVVTQEPSLSVSPGGTVTLTCALSSASVSTSSYPSWYQQTPGQPPRMLIHNTDTRSSGVPDRFSGSILGKKAALTITGAQADDESDYYCVVYLGNGFWVFGGGTKLTVLGGGGGGGGGEPRGPTIKPCPPCKCPAPNLLGGPSVFIFPPKIKDVLMISLSPIVTCVVVDVSEDDPDVQISWFVNNVEVHTAQTQTHREDYNSTLRVVSALPIQHQDWMSGKEFKCKVNNKDLPAPIERTISKPKGSVRAPQVYVLPPPEEEMTKKQVTLTCMVTDFMPEDIYVEWTNNGKTELNYKNTEPVLDSDGSYFMYSKLRVEKKNWVERNSYSCSVVHEGLHNHHTTKSFSRTPGK

SEQ ID NO: 264 - protein, 489 aa, Artificial Sequence
  synthetic construct; scFv construct
EVQLLQSGGGVVQPGGSLRLSCEASGFTFSSYSMHWVRQAPGKGLEWLTLISYNGVNKYYAKSVKGRFAISRDDSKSTLFLQMNSLTTDDTAVYYCARCPIPRAASYRNGDNYFEFGQGTLVTVSSGGGGSGGGGSGGGGSGGGGSQAVVTQEPSLSVSPGGTVTLTCALSSASVSTSSYPSWYQQTPGQPPRMLIHNTDTRSSGVPDRFSGSILGKKAALTITGAQADDESDYYCVVYLGNGFWVFGGGTKLTVLEPRGPTIKPCPPCKCPAPNLLGGPSVFIFPPKIKDVLMISLSPIVTCVVVDVSEDDPDVQISWFVNNVEVHTAQTQTHREDYNSTLRVVSALPIQHQDWMSGKEFKCKVNNKDLPAPIERTISKPKGSVRAPQVYVLPPPEEEMTKKQVTLTCMVTDFMPEDIYVEWTNNGKTELNYKNTEPVLDSDGSYFMYSKLRVEKKNWVERNSYSCSVVHEGLHNHHTTKSFSRTPGK

SEQ ID NO: 265 - protein, 494 aa, Artificial Sequence
  synthetic construct; scFv construct
EVQLLQSGGGVVQPGGSLRLSCEASGFTFSSYSMHWVRQAPGKGLEWLTLISYNGVNKYYAKSVKGRFAISRDDSKSTLFLQMNSLTTDDTAVYYCARCPIPRAASYRNGDNYFEFGQGTLVTVSSGGGGSGGGGSGGGGSGGGGSQAVVTQEPSLSVSPGGTVTLTCALSSASVSTSSYPSWYQQTPGQPPRMLIHNTDTRSSGVPDRFSGSILGKKAALTITGAQADDESDYYCVVYLGNGFWVFGGGTKLTVLGGGGGEPRGPTIKPCPPCKCPAPNLLGGPSVFIFPPKIKDVLMISLSPIVTCVVVDVSEDDPDVQISWFVNNVEVHTAQTQTHREDYNSTLRVVSALPIQHQDWMSGKEFKCKVNNKDLPAPIERTISKPKGSVRAPQVYVLPPPEEEMTKKQVTLTCMVTDFMPEDIYVEWTNNGKTELNYKNTEPVLDSDGSYFMYSKLRVEKKNWVERNSYSCSVVHEGLHNHHTTKSFSRTPGK

SEQ ID NO: 266 - protein, 498 aa, Artificial Sequence
  synthetic construct; scFv construct
EVQLLQSGGGVVQPGGSLRLSCEASGFTFSSYSMHWVRQAPGKGLEWLTLISYNGVNKYYAKSVKGRFAISRDDSKSTLFLQMNSLTTDDTAVYYCARCPIPRAASYRNGDNYFEFGQGTLVTVSSGGGGSGGGGSGGGGSGGGGSQAVVTQEPSLSVSPGGTVTLTCALSSASVSTSSYPSWYQQTPGQPPRMLIHNTDTRSSGVPDRFSGSILGKKAALTITGAQADDESDYYCVVYLGNGFWVFGGGTKLTVLGGGGGGGGGEPRGPTIKPCPPCKCPAPNLLGGPSVFIFPPKIKDVLMISLSPIVTCVVVDVSEDDPDVQISWFVNNVEVHTAQTQTHREDYNSTLRVVSALPIQHQDWMSGKEFKCKVNNKDLPAPIERTISKPKGSVRAPQVYVLPPPEEEMTKKQVTLTCMVTDFMPEDIYVEWTNNGKTELNYKNTEPVLDSDGSYFMYSKLRVEKKNWVERNSYSCSVVHEGLHNHHTTKSFSRTPGK

SEQ ID NO: 267 - protein, 479 aa, Artificial Sequence
  synthetic construct; scFv construct
QAVVTQEPSLSVSPGGTVTLTCALSSASVSTSSYPSWYQQTPGQPPRMLIHNTDTRSSGVPDRFSGSILGKKAALTITGAQADDESDYYCVVYLGNGFWVFGGGTKLTVLGGGGSGGGGSEVQLLQSGGGVVQPGGSLRLSCEASGFTFSSYSMHWVRQAPGKGLEWLTLISYNGVNKYYAKSVKGRFAISRDDSKSTLFLQMNSLTTDDTAVYYCARCPIPRAASYRNGDNYFEFGQGTLVTVSSEPRGPTIKPCPPCKCPAPNLLGGPSVFIFPPKIKDVLMISLSPIVTCVVVDVSEDDPDVQISWFVNNVEVHTAQTQTHREDYNSTLRVVSALPIQHQDWMSGKEFKCKVNNKDLPAPIERTISKPKGSVRAPQVYVLPPPEEEMTKKQVTLTCMVTDFMPEDIYVEWTNNGKTELNYKNTEPVLDSDGSYFMYSKLRVEKKNWVERNSYSCSVVHEGLHNHHTTKSFSRTPGK

SEQ ID NO: 268 - protein, 484 aa, Artificial Sequence
  synthetic construct; scFv construct
QAVVTQEPSLSVSPGGTVTLTCALSSASVSTSSYPSWYQQTPGQPPRMLIHNTDTRSSGVPDRFSGSILGKKAALTITGAQADDESDYYCVVYLGNGFWVFGGGTKLTVLGGGGSGGGGSEVQLLQSGGGVVQPGGSLRLSCEASGFTFSSYSMHWVRQAPGKGLEWLTLISYNGVNKYYAKSVKGRFAISRDDSKSTLFLQMNSLTTDDTAVYYCARCPIPRAASYRNGDNYFEFGQGTLVTVSSGGGGGEPRGPTIKPCPPCKCPAPNLLGGPSVFIFPPKIKDVLMISLSPIVTCVVVDVSEDDPDVQISWFVNNVEVHTAQTQTHREDYNSTLRVVSALPIQHQDWMSGKEFKCKVNNKDLPAPIERTISKPKGSVRAPQVYVLPPPEEEMTKKQVTLTCMVTDFMPEDIYVEWTNNGKTELNYKNTEPVLDSDGSYFMYSKLRVEKKNWVERNSYSCSVVHEGLHNHHTTKSFSRTPGK

SEQ ID NO: 269 - protein, 488 aa, Artificial Sequence
  synthetic construct; scFv construct
QAVVTQEPSLSVSPGGTVTLTCALSSASVSTSSYPSWYQQTPGQPPRMLIHNTDTRSSGVPDRFSGSILGKKAALTITGAQADDESDYYCVVYLGNGFWVFGGGTKLTVLGGGGSGGGGSEVQLLQSGGGVVQPGGSLRLSCEASGFTFSSYSMHWVRQAPGKGLEWLTLISYNGVNKYYAKSVKGRFAISRDDSKSTLFLQMNSLTTDDTAVYYCARCPIPRAASYRNGDNYFEFGQGTLVTVSSGGGGGGGGGEPRGPTIKPCPPCKCPAPNLLGGPSVFIFPPKIKDVLMISLSPIVTCVVVDVSEDDPDVQISWFVNNVEVHTAQTQTHREDYNSTLRVVSALPIQHQDWMSGKEFKCKVNNKDLPAPIERTISKPKGSVRAPQVYVLPPPEEEMTKKQVTLTCMVTDFMPEDIYVEWTNNGKTELNYKNTEPVLDSDGSYFMYSKLRVEKKNWVERNSYSCSVVHEGLHNHHTTKSFSRTPGK

SEQ ID NO: 270 - protein, 484 aa, Artificial Sequence
  synthetic construct; scFv construct
QAVVTQEPSLSVSPGGTVTLTCALSSASVSTSSYPSWYQQTPGQPPRMLIHNTDTRSSGVPDRFSGSILGKKAALTITGAQADDESDYYCVVYLGNGFWVFGGGTKLTVLGGGGSGGGGSGGGGSEVQLLQSGGGVVQPGGSLRLSCEASGFTFSSYSMHWVRQAPGKGLEWLTLISYNGVNKYYAKSVKGRFAISRDDSKSTLFLQMNSLTTDDTAVYYCARCPIPRAASYRNGDNYFEFGQGTLVTVSSEPRGPTIKPCPPCKCPAPNLLGGPSVFIFPPKIKDVLMISLSPIVTCVVVDVSEDDPDVQISWFVNNVEVHTAQTQTHREDYNSTLRVVSALPIQHQDWMSGKEFKCKVNNKDLPAPIERTISKPKGSVRAPQVYVLPPPEEEMTKKQVTLTCMVTDFMPEDIYVEWTNNGKTELNYKNTEPVLDSDGSYFMYSKLRVEKKNWVERNSYSCSVVHEGLHNHHTTKSFSRTPGK

SEQ ID NO: 271 - protein, 489 aa, Artificial Sequence
  synthetic construct; scFv construct
QAVVTQEPSLSVSPGGTVTLTCALSSASVSTSSYPSWYQQTPGQPPRMLIHNTDTRSSGVPDRFSGSILGKKAALTITGAQADDESDYYCVVYLGNGFWVFGGGTKLTVLGGGGSGGGGSGGGGSEVQLLQSGGGVVQPGGSLRLSCEASGFTFSSYSMHWVRQAPGKGLEWLTLISYNGVNKYYAKSVKGRFAISRDDSKSTLFLQMNSLTTDDTAVYYCARCPIPRAASYRNGDNYFEFGQGTLVTVSSGGGGGEPRGPTIKPCPPCKCPAPNLLGGPSVFIFPPKIKDVLMISLSPIVTCVVVDVSEDDPDVQISWFVNNVEVHTAQTQTHREDYNSTLRVVSALPIQHQDWMSGKEFKCKVNNKDLPAPIERTISKPKGSVRAPQVYVLPPPEEEMTKKQVTLTCMVTDFMPEDIYVEWTNNGKTELNYKNTEPVLDSDGSYFMYSKLRVEKKNWVERNSYSCSVVHEGLHNHHTTKSFSRTPGK

SEQ ID NO: 272 - protein, 493 aa, Artificial Sequence
  synthetic construct; scFv construct
QAVVTQEPSLSVSPGGTVTLTCALSSASVSTSSYPSWYQQTPGQPPRMLIHNTDTRSSGVPDRFSGSILGKKAALTITGAQADDESDYYCVVYLGNGFWVFGGGTKLTVLGGGGSGGGGSGGGGSEVQLLQSGGGVVQPGGSLRLSCEASGFTFSSYSMHWVRQAPGKGLEWLTLISYNGVNKYYAKSVKGRFAISRDDSKSTLFLQMNSLTTDDTAVYYCARCPIPRAASYRNGDNYFEFGQGTLVTVSSGGGGGGGGGEPRGPTIKPCPPCKCPAPNLLGGPSVFIFPPKIKDVLMISLSPIVTCVVVDVSEDDPDVQISWFVNNVEVHTAQTQTHREDYNSTLRVVSALPIQHQDWMSGKEFKCKVNNKDLPAPIERTISKPKGSVRAPQVYVLPPPEEEMTKKQVTLTCMVTDFMPEDIYVEWTNNGKTELNYKNTEPVLDSDGSYFMYSKLRVEKKNWVERNSYSCSVVHEGLHNHHTTKSFSRTPGK

SEQ ID NO: 273 - protein, 489 aa, Artificial Sequence
  synthetic construct; scFv construct
QAVVTQEPSLSVSPGGTVTLTCALSSASVSTSSYPSWYQQTPGQPPRMLIHNTDTRSSGVPDRFSGSILGKKAALTITGAQADDESDYYCVVYLGNGFWVFGGGTKLTVLGGGGSGGGGSGGGGSGGGGSEVQLLQSGGGVVQPGGSLRLSCEASGFTFSSYSMHWVRQAPGKGLEWLTLISYNGVNKYYAKSVKGRFAISRDDSKSTLFLQMNSLTTDDTAVYYCARCPIPRAASYRNGDNYFEFGQGTLVTVSSEPRGPTIKPCPPCKCPAPNLLGGPSVFIFPPKIKDVLMISLSPIVTCVVVDVSEDDPDVQISWFVNNVEVHTAQTQTHREDYNSTLRVVSALPIQHQDWMSGKEFKCKVNNKDLPAPIERTISKPKGSVRAPQVYVLPPPEEEMTKKQVTLTCMVTDFMPEDIYVEWTNNGKTELNYKNTEPVLDSDGSYFMYSKLRVEKKNWVERNSYSCSVVHEGLHNHHTTKSFSRTPGK

SEQ ID NO: 274 - protein, 494 aa, Artificial Sequence
  synthetic construct; scFv construct
QAVVTQEPSLSVSPGGTVTLTCALSSASVSTSSYPSWYQQTPGQPPRMLIHNTDTRSSGVPDRFSGSILGKKAALTITGAQADDESDYYCVVYLGNGFWVFGGGTKLTVLGGGGSGGGGSGGGGSGGGGSEVQLLQSGGGVVQPGGSLRLSCEASGFTFSSYSMHWVRQAPGKGLEWLTLISYNGVNKYYAKSVKGRFAISRDDSKSTLFLQMNSLTTDDTAVYYCARCPIPRAASYRNGDNYFEFGQGTLVTVSSGGGGGEPRGPTIKPCPPCKCPAPNLLGGPSVFIFPPKIKDVLMISLSPIVTCVVVDVSEDDPDVQISWFVNNVEVHTAQTQTHREDYNSTLRVVSALPIQHQDWMSGKEFKCKVNNKDLPAPIERTISKPKGSVRAPQVYVLPPPEEEMTKKQVTLTCMVTDFMPEDIYVEWTNNGKTELNYKNTEPVLDSDGSYFMYSKLRVEKKNWVERNSYSCSVVHEGLHNHHTTKSFSRTPGK

SEQ ID NO: 275 - protein, 498 aa, Artificial Sequence
  synthetic construct; scFv construct
QAVVTQEPSLSVSPGGTVTLTCALSSASVSTSSYPSWYQQTPGQPPRMLIHNTDTRSSGVPDRFSGSILGKKAALTITGAQADDESDYYCVVYLGNGFWVFGGGTKLTVLGGGGSGGGGSGGGGSGGGGSEVQLLQSGGGVVQPGGSLRLSCEASGFTFSSYSMHWVRQAPGKGLEWLTLISYNGVNKYYAKSVKGRFAISRDDSKSTLFLQMNSLTTDDTAVYYCARCPIPRAASYRNGDNYFEFGQGTLVTVSSGGGGGGGGGEPRGPTIKPCPPCKCPAPNLLGGPSVFIFPPKIKDVLMISLSPIVTCVVVDVSEDDPDVQISWFVNNVEVHTAQTQTHREDYNSTLRVVSALPIQHQDWMSGKEFKCKVNNKDLPAPIERTISKPKGSVRAPQVYVLPPPEEEMTKKQVTLTCMVTDFMPEDIYVEWTNNGKTELNYKNTEPVLDSDGSYFMYSKLRVEKKNWVERNSYSCSVVHEGLHNHHTTKSFSRTPGK

SEQ ID NO: 276 - protein, 468 aa, Artificial Sequence
  synthetic construct; scFv construct
EVQLVESGGGLVQPGGSLRLSCAASGFTFSIYTMSWVRQAPGKGLEWVSAILSDGSTYYADSVEGRFTISRDNSKTTLYLQMNSLTAEDTAVYYCTKRVEGSFRGWGQGTLVTVSSGGGGSGGGGSEIVMTQSPGTLSLSPGESATLSCRASQSVSTTYLAWYQQKPGQAPRLLIYGASSRATGIPDRFSGSGSGTDFTLTISRLEPEDFAVYYCQQYGGSRLITFGQGTRLEIKEPRGPTIKPCPPCKCPAPNLLGGPSVFIFPPKIKDVLMISLSPIVTCVVVDVSEDDPDVQISWFVNNVEVHTAQTQTHREDYNSTLRVVSALPIQHQDWMSGKEFKCKVNNKDLPAPIERTISKPKGSVRAPQVYVLPPPEEEMTKKQVTLTCMVTDFMPEDIYVEWTNNGKTELNYKNTEPVLDSDGSYFMYSKLRVEKKNWVERNSYSCSVVHEGLHNHHTTKSFSRTPGK

SEQ ID NO: 277 - protein, 464 aa, Artificial Sequence
  synthetic construct; scFv construct
EVQLVESGGGLVQPGGSLRLSCAASGFTFSIYTMSWVRQAPGKGLEWVSAILSDGSTYYADSVEGRFTISRDNSKTTLYLQMNSLTAEDTAVYYCTKRVEGSFRGWGQGTLVTVSSGGGGSGGGGSEIVMTQSPGTLSLSPGESATLSCRASQSVSTTYLAWYQQKPGQAPRLLIYGASSRATGIPDRFSGSGSGTDFTLTISRLEPEDFAVYYCQQYGGSRLITFGQGTRLEIKESKYGPPCPSCPAPEFLGGPSVFLFPPKPKDTLMISRTPEVTCVVVDVSQEDPEVQFNWYVDGVEVHNAKTKPREEQFNSTYRVVSVLTVLHQDWLNGKEYKCKVSNKGLPSSIEKTISKAKGQPREPQVYTLPPSQEEMTKNQVSLTCLVKGFYPSDIAVEWESNGQPENNYKTTPPVLDSDGSFFLYSRLTVDKSRWQEGNVFSCSVMHEALHNHYTQKSLSLSLGK

SEQ ID NO: 278 - protein, 473 aa, Artificial Sequence
  synthetic construct; scFv construct
EVQLVESGGGLVQPGGSLRLSCAASGFTFSIYTMSWVRQAPGKGLEWVSAILSDGSTYYADSVEGRFTISRDNSKTTLYLQMNSLTAEDTAVYYCTKRVEGSFRGWGQGTLVTVSSGGGGSGGGGSEIVMTQSPGTLSLSPGESATLSCRASQSVSTTYLAWYQQKPGQAPRLLIYGASSRATGIPDRFSGSGSGTDFTLTISRLEPEDFAVYYCQQYGGSRLITFGQGTRLEIKGGGGGEPRGPTIKPCPPCKCPAPNLLGGPSVFIFPPKIKDVLMISLSPIVTCVVVDVSEDDPDVQISWFVNNVEVHTAQTQTHREDYNSTLRVVSALPIQHQDWMSGKEFKCKVNNKDLPAPIERTISKPKGSVRAPQVYVLPPPEEEMTKKQVTLTCMVTDFMPEDIYVEWTNNGKTELNYKNTEPVLDSDGSYFMYSKLRVEKKNWVERNSYSCSVVHEGLHNHHTTKSFSRTPGK

SEQ ID NO: 279 - protein, 469 aa, Artificial Sequence
  synthetic construct; scFv construct
EVQLVESGGGLVQPGGSLRLSCAASGFTFSIYTMSWVRQAPGKGLEWVSAILSDGSTYYADSVEGRFTISRDNSKTTLYLQMNSLTAEDTAVYYCTKRVEGSFRGWGQGTLVTVSSGGGGSGGGGSEIVMTQSPGTLSLSPGESATLSCRASQSVSTTYLAWYQQKPGQAPRLLIYGASSRATGIPDRFSGSGSGTDFTLTISRLEPEDFAVYYCQQYGGSRLITFGQGTRLEIKGGGGGESKYGPPCPSCPAPEFLGGPSVFLFPPKPKDTLMISRTPEVTCVVVDVSQEDPEVQFNWYVDGVEVHNAKTKPREEQFNSTYRVVSVLTVLHQDWLNGKEYKCKVSNKGLPSSIEKTISKAKGQPREPQVYTLPPSQEEMTKNQVSLTCLVKGFYPSDIAVEWESNGQPENNYKTTPPVLDSDGSFFLYSRLTVDKSRWQEGNVFSCSVMHEALHNHYTQKSLSLSLGK

SEQ ID NO: 280 - protein, 477 aa, Artificial Sequence
  synthetic construct; scFv construct
EVQLVESGGGLVQPGGSLRLSCAASGFTFSIYTMSWVRQAPGKGLEWVSAILSDGSTYYADSVEGRFTISRDNSKTTLYLQMNSLTAEDTAVYYCTKRVEGSFRGWGQGTLVTVSSGGGGSGGGGSEIVMTQSPGTLSLSPGESATLSCRASQSVSTTYLAWYQQKPGQAPRLLIYGASSRATGIPDRFSGSGSGTDFTLTISRLEPEDFAVYYCQQYGGSRLITFGQGTRLEIKGGGGGGGGGEPRGPTIKPCPPCKCPAPNLLGGPSVFIFPPKIKDVLMISLSPIVTCVVVDVSEDDPDVQISWFVNNVEVHTAQTQTHREDYNSTLRVVSALPIQHQDWMSGKEFKCKVNNKDLPAPIERTISKPKGSVRAPQVYVLPPPEEEMTKKQVTLTCMVTDFMPEDIYVEWTNNGKTELNYKNTEPVLDSDGSYFMYSKLRVEKKNWVERNSYSCSVVHEGLHNHHTTKSFSRTPGK

SEQ ID NO: 281 - protein, 473 aa, Artificial Sequence
  synthetic construct; scFv construct
EVQLVESGGGLVQPGGSLRLSCAASGFTFSIYTMSWVRQAPGKGLEWVSAILSDGSTYYADSVEGRFTISRDNSKTTLYLQMNSLTAEDTAVYYCTKRVEGSFRGWGQGTLVTVSSGGGGSGGGGSEIVMTQSPGTLSLSPGESATLSCRASQSVSTTYLAWYQQKPGQAPRLLIYGASSRATGIPDRFSGSGSGTDFTLTISRLEPEDFAVYYCQQYGGSRLITFGQGTRLEIKGGGGGGGGGESKYGPPCPSCPAPEFLGGPSVFLFPPKPKDTLMISRTPEVTCVVVDVSQEDPEVQFNWYVDGVEVHNAKTKPREEQFNSTYRVVSVLTVLHQDWLNGKEYKCKVSNKGLPSSIEKTISKAKGQPREPQVYTLPPSQEEMTKNQVSLTCLVKGFYPSDIAVEWESNGQPENNYKTTPPVLDSDGSFFLYSRLTVDKSRWQEGNVFSCSVMHEALHNHYTQKSLSLSLGK

SEQ ID NO: 282 - protein, 473 aa, Artificial Sequence
  synthetic construct; scFv construct
EVQLVESGGGLVQPGGSLRLSCAASGFTFSIYTMSWVRQAPGKGLEWVSAILSDGSTYYADSVEGRFTISRDNSKTTLYLQMNSLTAEDTAVYYCTKRVEGSFRGWGQGTLVTVSSGGGGSGGGGSGGGGSEIVMTQSPGTLSLSPGESATLSCRASQSVSTTYLAWYQQKPGQAPRLLIYGASSRATGIPDRFSGSGSGTDFTLTISRLEPEDFAVYYCQQYGGSRLITFGQGTRLEIKEPRGPTIKPCPPCKCPAPNLLGGPSVFIFPPKIKDVLMISLSPIVTCVVVDVSEDDPDVQISWFVNNVEVHTAQTQTHREDYNSTLRVVSALPIQHQDWMSGKEFKCKVNNKDLPAPIERTISKPKGSVRAPQVYVLPPPEEEMTKKQVTLTCMVTDFMPEDIYVEWTNNGKTELNYKNTEPVLDSDGSYFMYSKLRVEKKNWVERNSYSCSVVHEGLHNHHTTKSFSRTPGK

SEQ ID NO: 283 - protein, 478 aa, Artificial Sequence
  synthetic construct; scFv construct
EVQLVESGGGLVQPGGSLRLSCAASGFTFSIYTMSWVRQAPGKGLEWVSAILSDGSTYYADSVEGRFTISRDNSKTTLYLQMNSLTAEDTAVYYCTKRVEGSFRGWGQGTLVTVSSGGGGSGGGGSGGGGSEIVMTQSPGTLSLSPGESATLSCRASQSVSTTYLAWYQQKPGQAPRLLIYGASSRATGIPDRFSGSGSGTDFTLTISRLEPEDFAVYYCQQYGGSRLITFGQGTRLEIKGGGGGEPRGPTIKPCPPCKCPAPNLLGGPSVFIFPPKIKDVLMISLSPIVTCVVVDVSEDDPDVQISWFVNNVEVHTAQTQTHREDYNSTLRVVSALPIQHQDWMSGKEFKCKVNNKDLPAPIERTISKPKGSVRAPQVYVLPPPEEEMTKKQVTLTCMVTDFMPEDIYVEWTNNGKTELNYKNTEPVLDSDGSYFMYSKLRVEKKNWVERNSYSCSVVHEGLHNHHTTKSFSRTPGK

SEQ ID NO: 284 - protein, 482 aa, Artificial Sequence
  synthetic construct; scFv construct
EVQLVESGGGLVQPGGSLRLSCAASGFTFSIYTMSWVRQAPGKGLEWVSAILSDGSTYYADSVEGRFTISRDNSKTTLYLQMNSLTAEDTAVYYCTKRVEGSFRGWGQGTLVTVSSGGGGSGGGGSGGGGSEIVMTQSPGTLSLSPGESATLSCRASQSVSTTYLAWYQQKPGQAPRLLIYGASSRATGIPDRFSGSGSGTDFTLTISRLEPEDFAVYYCQQYGGSRLITFGQGTRLEIKGGGGGGGGGEPRGPTIKPCPPCKCPAPNLLGGPSVFIFPPKIKDVLMISLSPIVTCVVVDVSEDDPDVQISWFVNNVEVHTAQTQTHREDYNSTLRVVSALPIQHQDWMSGKEFKCKVNNKDLPAPIERTISKPKGSVRAPQVYVLPPPEEEMTKKQVTLTCMVTDFMPEDIYVEWTNNGKTELNYKNTEPVLDSDGSYFMYSKLRVEKKNWVERNSYSCSVVHEGLHNHHTTKSFSRTPGK

SEQ ID NO: 285 - protein, 478 aa, Artificial Sequence
  synthetic construct; scFv construct
EVQLVESGGGLVQPGGSLRLSCAASGFTFSIYTMSWVRQAPGKGLEWVSAILSDGSTYYADSVEGRFTISRDNSKTTLYLQMNSLTAEDTAVYYCTKRVEGSFRGWGQGTLVTVSSGGGGSGGGGSGGGGSGGGGSEIVMTQSPGTLSLSPGESATLSCRASQSVSTTYLAWYQQKPGQAPRLLIYGASSRATGIPDRFSGSGSGTDFTLTISRLEPEDFAVYYCQQYGGSRLITFGQGTRLEIKEPRGPTIKPCPPCKCPAPNLLGGPSVFIFPPKIKDVLMISLSPIVTCVVVDVSEDDPDVQISWFVNNVEVHTAQTQTHREDYNSTLRVVSALPIQHQDWMSGKEFKCKVNNKDLPAPIERTISKPKGSVRAPQVYVLPPPEEEMTKKQVTLTCMVTDFMPEDIYVEWTNNGKTELNYKNTEPVLDSDGSYFMYSKLRVEKKNWVERNSYSCSVVHEGLHNHHTTKSFSRTPGK

SEQ ID NO: 286 - protein, 483 aa, Artificial Sequence
  synthetic construct; scFv construct
EVQLVESGGGLVQPGGSLRLSCAASGFTFSIYTMSWVRQAPGKGLEWVSAILSDGSTYYADSVEGRFTISRDNSKTTLYLQMNSLTAEDTAVYYCTKRVEGSFRGWGQGTLVTVSSGGGGSGGGGSGGGGSGGGGSEIVMTQSPGTLSLSPGESATLSCRASQSVSTTYLAWYQQKPGQAPRLLIYGASSRATGIPDRFSGSGSGTDFTLTISRLEPEDFAVYYCQQYGGSRLITFGQGTRLEIKGGGGGEPRGPTIKPCPPCKCPAPNLLGGPSVFIFPPKIKDVLMISLSPIVTCVVVDVSEDDPDVQISWFVNNVEVHTAQTQTHREDYNSTLRVVSALPIQHQDWMSGKEFKCKVNNKDLPAPIERTISKPKGSVRAPQVYVLPPPEEEMTKKQVTLTCMVTDFMPEDIYVEWTNNGKTELNYKNTEPVLDSDGSYFMYSKLRVEKKNWVERNSYSCSVVHEGLHNHHTTKSFSRTPGK

SEQ ID NO: 287 - protein, 487 aa, Artificial Sequence
  synthetic construct; scFv construct
EVQLVESGGGLVQPGGSLRLSCAASGFTFSIYTMSWVRQAPGKGLEWVSAILSDGSTYYADSVEGRFTISRDNSKTTLYLQMNSLTAEDTAVYYCTKRVEGSFRGWGQGTLVTVSSGGGGSGGGGSGGGGSGGGGSEIVMTQSPGTLSLSPGESATLSCRASQSVSTTYLAWYQQKPGQAPRLLIYGASSRATGIPDRFSGSGSGTDFTLTISRLEPEDFAVYYCQQYGGSRLITFGQGTRLEIKGGGGGGGGGEPRGPTIKPCPPCKCPAPNLLGGPSVFIFPPKIKDVLMISLSPIVTCVVVDVSEDDPDVQISWFVNNVEVHTAQTQTHREDYNSTLRVVSALPIQHQDWMSGKEFKCKVNNKDLPAPIERTISKPKGSVRAPQVYVLPPPEEEMTKKQVTLTCMVTDFMPEDIYVEWTNNGKTELNYKNTEPVLDSDGSYFMYSKLRVEKKNWVERNSYSCSVVHEGLHNHHTTKSFSRTPGK

SEQ ID NO: 288 - protein, 467 aa, Artificial Sequence
  synthetic construct; scFv construct
IVMTQSPGTLSLSPGESATLSCRASQSVSTTYLAWYQQKPGQAPRLLIYGASSRATGIPDRFSGSGSGTDFTLTISRLEPEDFAVYYCQQYGGSRLITFGQGTRLEIKGGGGSGGGGSEVQLVESGGGLVQPGGSLRLSCAASGFTFSIYTMSWVRQAPGKGLEWVSAILSDGSTYYADSVEGRFTISRDNSKTTLYLQMNSLTAEDTAVYYCTKRVEGSFRGWGQGTLVTVSSEPRGPTIKPCPPCKCPAPNLLGGPSVFIFPPKIKDVLMISLSPIVTCVVVDVSEDDPDVQISWFVNNVEVHTAQTQTHREDYNSTLRVVSALPIQHQDWMSGKEFKCKVNNKDLPAPIERTISKPKGSVRAPQVYVLPPPEEEMTKKQVTLTCMVTDFMPEDIYVEWTNNGKTELNYKNTEPVLDSDGSYFMYSKLRVEKKNWVERNSYSCSVVHEGLHNHHTTKSFSRTPGK

SEQ ID NO: 289 - protein, 473 aa, Artificial Sequence
  synthetic construct; scFv construct
EIVMTQSPGTLSLSPGESATLSCRASQSVSTTYLAWYQQKPGQAPRLLIYGASSRATGIPDRFSGSGSGTDFTLTISRLEPEDFAVYYCQQYGGSRLITFGQGTRLEIKGGGGSGGGGSEVQLVESGGGLVQPGGSLRLSCAASGFTFSIYTMSWVRQAPGKGLEWVSAILSDGSTYYADSVEGRFTISRDNSKTTLYLQMNSLTAEDTAVYYCTKRVEGSFRGWGQGTLVTVSSGGGGGEPRGPTIKPCPPCKCPAPNLLGGPSVFIFPPKIKDVLMISLSPIVTCVVVDVSEDDPDVQISWFVNNVEVHTAQTQTHREDYNSTLRVVSALPIQHQDWMSGKEFKCKVNNKDLPAPIERTISKPKGSVRAPQVYVLPPPEEEMTKKQVTLTCMVTDFMPEDIYVEWTNNGKTELNYKNTEPVLDSDGSYFMYSKLRVEKKNWVERNSYSCSVVHEGLHNHHTTKSFSRTPGK

SEQ ID NO: 290 - protein, 477 aa, Artificial Sequence
  synthetic construct; scFv construct
EIVMTQSPGTLSLSPGESATLSCRASQSVSTTYLAWYQQKPGQAPRLLIYGASSRATGIPDRFSGSGSGTDFTLTISRLEPEDFAVYYCQQYGGSRLITFGQGTRLEIKGGGGSGGGGSEVQLVESGGGLVQPGGSLRLSCAASGFTFSIYTMSWVRQAPGKGLEWVSAILSDGSTYYADSVEGRFTISRDNSKTTLYLQMNSLTAEDTAVYYCTKRVEGSFRGWGQGTLVTVSSGGGGGGGGGEPRGPTIKPCPPCKCPAPNLLGGPSVFIFPPKIKDVLMISLSPIVTCVVVDVSEDDPDVQISWFVNNVEVHTAQTQTHREDYNSTLRVVSALPIQHQDWMSGKEFKCKVNNKDLPAPIERTISKPKGSVRAPQVYVLPPPEEEMTKKQVTLTCMVTDFMPEDIYVEWTNNGKTELNYKNTEPVLDSDGSYFMYSKLRVEKKNWVERNSYSCSVVHEGLHNHHTTKSFSRTPGK

SEQ ID NO: 291 - protein, 473 aa, Artificial Sequence
  synthetic construct; scFv construct
EIVMTQSPGTLSLSPGESATLSCRASQSVSTTYLAWYQQKPGQAPRLLIYGASSRATGIPDRFSGSGSGTDFTLTISRLEPEDFAVYYCQQYGGSRLITFGQGTRLEIKGGGGSGGGGSGGGGSEVQLVESGGGLVQPGGSLRLSCAASGFTFSIYTMSWVRQAPGKGLEWVSAILSDGSTYYADSVEGRFTISRDNSKTTLYLQMNSLTAEDTAVYYCTKRVEGSFRGWGQGTLVTVSSEPRGPTIKPCPPCKCPAPNLLGGPSVFIFPPKIKDVLMISLSPIVTCVVVDVSEDDPDVQISWFVNNVEVHTAQTQTHREDYNSTLRVVSALPIQHQDWMSGKEFKCKVNNKDLPAPIERTISKPKGSVRAPQVYVLPPPEEEMTKKQVTLTCMVTDFMPEDIYVEWTNNGKTELNYKNTEPVLDSDGSYFMYSKLRVEKKNWVERNSYSCSVVHEGLHNHHTTKSFSRTPGK

SEQ ID NO: 292 - protein, 478 aa, Artificial Sequence
  synthetic construct; scFv construct
EIVMTQSPGTLSLSPGESATLSCRASQSVSTTYLAWYQQKPGQAPRLLIYGASSRATGIPDRFSGSGSGTDFTLTISRLEPEDFAVYYCQQYGGSRLITFGQGTRLEIKGGGGSGGGGSGGGGSEVQLVESGGGLVQPGGSLRLSCAASGFTFSIYTMSWVRQAPGKGLEWVSAILSDGSTYYADSVEGRFTISRDNSKTTLYLQMNSLTAEDTAVYYCTKRVEGSFRGWGQGTLVTVSSGGGGGEPRGPTIKPCPPCKCPAPNLLGGPSVFIFPPKIKDVLMISLSPIVTCVVVDVSEDDPDVQISWFVNNVEVHTAQTQTHREDYNSTLRVVSALPIQHQDWMSGKEFKCKVNNKDLPAPIERTISKPKGSVRAPQVYVLPPPEEEMTKKQVTLTCMVTDFMPEDIYVEWTNNGKTELNYKNTEPVLDSDGSYFMYSKLRVEKKNWVERNSYSCSVVHEGLHNHHTTKSFSRTPGK

SEQ ID NO: 293 - protein, 482 aa, Artificial Sequence
  synthetic construct; scFv construct
EIVMTQSPGTLSLSPGESATLSCRASQSVSTTYLAWYQQKPGQAPRLLIYGASSRATGIPDRFSGSGSGTDFTLTISRLEPEDFAVYYCQQYGGSRLITFGQGTRLEIKGGGGSGGGGSGGGGSEVQLVESGGGLVQPGGSLRLSCAASGFTFSIYTMSWVRQAPGKGLEWVSAILSDGSTYYADSVEGRFTISRDNSKTTLYLQMNSLTAEDTAVYYCTKRVEGSFRGWGQGTLVTVSSGGGGGGGGGEPRGPTIKPCPPCKCPAPNLLGGPSVFIFPPKIKDVLMISLSPIVTCVVVDVSEDDPDVQISWFVNNVEVHTAQTQTHREDYNSTLRVVSALPIQHQDWMSGKEFKCKVNNKDLPAPIERTISKPKGSVRAPQVYVLPPPEEEMTKKQVTLTCMVTDFMPEDIYVEWTNNGKTELNYKNTEPVLDSDGSYFMYSKLRVEKKNWVERNSYSCSVVHEGLHNHHTTKSFSRTPGK

SEQ ID NO: 294 - protein, 478 aa, Artificial Sequence
  synthetic construct; scFv construct
EIVMTQSPGTLSLSPGESATLSCRASQSVSTTYLAWYQQKPGQAPRLLIYGASSRATGIPDRFSGSGSGTDFTLTISRLEPEDFAVYYCQQYGGSRLITFGQGTRLEIKGGGGSGGGGSGGGGSGGGGSEVQLVESGGGLVQPGGSLRLSCAASGFTFSIYTMSWVRQAPGKGLEWVSAILSDGSTYYADSVEGRFTISRDNSKTTLYLQMNSLTAEDTAVYYCTKRVEGSFRGWGQGTLVTVSSEPRGPTIKPCPPCKCPAPNLLGGPSVFIFPPKIKDVLMISLSPIVTCVVVDVSEDDPDVQISWFVNNVEVHTAQTQTHREDYNSTLRVVSALPIQHQDWMSGKEFKCKVNNKDLPAPIERTISKPKGSVRAPQVYVLPPPEEEMTKKQVTLTCMVTDFMPEDIYVEWTNNGKTELNYKNTEPVLDSDGSYFMYSKLRVEKKNWVERNSYSCSVVHEGLHNHHTTKSFSRTPGK

SEQ ID NO: 295 - protein, 483 aa, Artificial Sequence
  synthetic construct; scFv construct
EIVMTQSPGTLSLSPGESATLSCRASQSVSTTYLAWYQQKPGQAPRLLIYGASSRATGIPDRFSGSGSGTDFTLTISRLEPEDFAVYYCQQYGGSRLITFGQGTRLEIKGGGGSGGGGSGGGGSGGGGSEVQLVESGGGLVQPGGSLRLSCAASGFTFSIYTMSWVRQAPGKGLEWVSAILSDGSTYYADSVEGRFTISRDNSKTTLYLQMNSLTAEDTAVYYCTKRVEGSFRGWGQGTLVTVSSGGGGGEPRGPTIKPCPPCKCPAPNLLGGPSVFIFPPKIKDVLMISLSPIVTCVVVDVSEDDPDVQISWFVNNVEVHTAQTQTHREDYNSTLRVVSALPIQHQDWMSGKEFKCKVNNKDLPAPIERTISKPKGSVRAPQVYVLPPPEEEMTKKQVTLTCMVTDFMPEDIYVEWTNNGKTELNYKNTEPVLDSDGSYFMYSKLRVEKKNWVERNSYSCSVVHEGLHNHHTTKSFSRTPGK

SEQ ID NO: 296 - protein, 487 aa, Artificial Sequence
  synthetic construct; scFv construct
EIVMTQSPGTLSLSPGESATLSCRASQSVSTTYLAWYQQKPGQAPRLLIYGASSRATGIPDRFSGSGSGTDFTLTISRLEPEDFAVYYCQQYGGSRLITFGQGTRLEIKGGGGSGGGGSGGGGSGGGGSEVQLVESGGGLVQPGGSLRLSCAASGFTFSIYTMSWVRQAPGKGLEWVSAILSDGSTYYADSVEGRFTISRDNSKTTLYLQMNSLTAEDTAVYYCTKRVEGSFRGWGQGTLVTVSSGGGGGGGGGEPRGPTIKPCPPCKCPAPNLLGGPSVFIFPPKIKDVLMISLSPIVTCVVVDVSEDDPDVQISWFVNNVEVHTAQTQTHREDYNSTLRVVSALPIQHQDWMSGKEFKCKVNNKDLPAPIERTISKPKGSVRAPQVYVLPPPEEEMTKKQVTLTCMVTDFMPEDIYVEWTNNGKTELNYKNTEPVLDSDGSYFMYSKLRVEKKNWVERNSYSCSVVHEGLHNHHTTKSFSRTPGK

SEQ ID NO: 297 - protein, 235 aa, Artificial Sequence
  synthetic construct; scFv construct
EVQLVESGGGLVQPGGSLRLSCAASGFTFSIYTMSWVRQAPGKGLEWVSAILSDGSTYYADSVEGRFTISRDNSKTTLYLQMNSLTAEDTAVYYCTKRVEGSFRGWGQGTLVTVSSGGGGSGGGGSEIVMTQSPGTLSLSPGESATLSCRASQSVSTTYLAWYQQKPGQAPRLLIYGASSRATGIPDRFSGSGSGTDFTLTISRLEPEDFAVYYCQQYGGSRLITFGQGTRLEIK

SEQ ID NO: 298 - protein, 240 aa, Artificial Sequence
  synthetic construct; scFv construct
EVQLVESGGGLVQPGGSLRLSCAASGFTFSIYTMSWVRQAPGKGLEWVSAILSDGSTYYADSVEGRFTISRDNSKTTLYLQMNSLTAEDTAVYYCTKRVEGSFRGWGQGTLVTVSSGGGGSGGGGSGGGGSEIVMTQSPGTLSLSPGESATLSCRASQSVSTTYLAWYQQKPGQAPRLLIYGASSRATGIPDRFSGSGSGTDFTLTISRLEPEDFAVYYCQQYGGSRLITFGQGTRLEIK

SEQ ID NO: 299 - protein, 245 aa, Artificial Sequence
  synthetic construct; scFv construct
EVQLVESGGGLVQPGGSLRLSCAASGFTFSIYTMSWVRQAPGKGLEWVSAILSDGSTYYADSVEGRFTISRDNSKTTLYLQMNSLTAEDTAVYYCTKRVEGSFRGWGQGTLVTVSSGGGGSGGGGSGGGGSGGGGSEIVMTQSPGTLSLSPGESATLSCRASQSVSTTYLAWYQQKPGQAPRLLIYGASSRATGIPDRFSGSGSGTDFTLTISRLEPEDFAVYYCQQYGGSRLITFGQGTRLEIK

SEQ ID NO: 300 - protein, 246 aa, Artificial Sequence
  synthetic construct; scFv construct
EVQLLQSGGGVVQPGGSLRLSCEASGFTFSSYSMHWVRQAPGKGLEWLTLISYNGVNKYYAKSVKGRFAISRDDSKSTLFLQMNSLTTDDTAVYYCARCPIPRAASYRNGDNYFEFGQGTLVTVSSGGGGSGGGGSQAVVTQEPSLSVSPGGTVTLTCALSSASVSTSSYPSWYQQTPGQPPRMLIHNTDTRSSGVPDRFSGSILGKKAALTITGAQADDESDYYCVVYLGNGFWVFGGGTKLTVL

SEQ ID NO: 301 - protein, 251 aa, Artificial Sequence
  synthetic construct; scFv construct
EVQLLQSGGGVVQPGGSLRLSCEASGFTFSSYSMHWVRQAPGKGLEWLTLISYNGVNKYYAKSVKGRFAISRDDSKSTLFLQMNSLTTDDTAVYYCARCPIPRAASYRNGDNYFEFGQGTLVTVSSGGGGSGGGGSGGGGSQAVVTQEPSLSVSPGGTVTLTCALSSASVSTSSYPSWYQQTPGQPPRMLIHNTDTRSSGVPDRFSGSILGKKAALTITGAQADDESDYYCVVYLGNGFWVFGGGTKLTVL

SEQ ID NO: 302 - protein, 256 aa, Artificial Sequence
  synthetic construct; scFv construct
EVQLLQSGGGVVQPGGSLRLSCEASGFTFSSYSMHWVRQAPGKGLEWLTLISYNGVNKYYAKSVKGRFAISRDDSKSTLFLQMNSLTTDDTAVYYCARCPIPRAASYRNGDNYFEFGQGTLVTVSSGGGGSGGGGSGGGGSGGGGSQAVVTQEPSLSVSPGGTVTLTCALSSASVSTSSYPSWYQQTPGQPPRMLIHNTDTRSSGVPDRFSGSILGKKAALTITGAQADDESDYYCVVYLGNGFWVFGGGTKLTVL

SEQ ID NO: 303 - protein, 245 aa, Artificial Sequence
  synthetic construct; scFv construct
EVQLVQSGAEVKKPGESLKISCKVSGYDFSKYWIGWVRQMPGKGLEWMGLIYPGDSDTRYSPSLEGQVSISADKSISAAYLQFSSLKASDSAMYYCVRKGYSAYLGGWFDPWGQGTLVTVSSGGGGSGGGGSDIQLTQSPDSLAASLGERVTINCRSSQNIFYNSNNKNFLAWYQQKAGQSPKLLIYWASTRESGVPDRFSGSGSGTDFTLTISGLQAGDVAVYFCQQYFTDAPTFGGGTKVEIK

SEQ ID NO: 304 - protein, 250 aa, Artificial Sequence
  synthetic construct; scFv construct
EVQLVQSGAEVKKPGESLKISCKVSGYDFSKYWIGWVRQMPGKGLEWMGLIYPGDSDTRYSPSLEGQVSISADKSISAAYLQFSSLKASDSAMYYCVRKGYSAYLGGWFDPWGQGTLVTVSSGGGGSGGGGSGGGGSDIQLTQSPDSLAASLGERVTINCRSSQNIFYNSNNKNFLAWYQQKAGQSPKLLIYWASTRESGVPDRFSGSGSGTDFTLTISGLQAGDVAVYFCQQYFTDAPTFGGGTKVEIK

SEQ ID NO: 305 - protein, 255 aa, Artificial Sequence
  synthetic construct; scFv construct
EVQLVQSGAEVKKPGESLKISCKVSGYDFSKYWIGWVRQMPGKGLEWMGLIYPGDSDTRYSPSLEGQVSISADKSISAAYLQFSSLKASDSAMYYCVRKGYSAYLGGWFDPWGQGTLVTVSSGGGGSGGGGSGGGGSGGGGSDIQLTQSPDSLAASLGERVTINCRSSQNIFYNSNNKNFLAWYQQKAGQSPKLLIYWASTRESGVPDRFSGSGSGTDFTLTISGLQAGDVAVYFCQQYFTDAPTFGGGTKVEIK

SEQ ID NO: 306 - DNA, 366 bp, Artificial Sequence
  synthetic construct; scFv construct
gaggtgcagctggtgcagtctggggctgaagtgaagaagcctggggagagcctgaagatcagctgcaaagtgtctggctatgacttcagcaagtactggattggctgggtcagacagatgcctggcaaaggcctggaatggatgggactgatctaccctggggactctgacaccagatacagccctagcctggaaggccaggtgtccatctctgctgacaagagcatctctgcagcctacctgcagttcagcagcctgaaggcctctgactctgccatgtactactgtgtcagaaagggctactctgcctaccttggaggatggtttgatccttggggccagggcacactggtcacagtgtcctct

SEQ ID NO: 307 - DNA, 339 bp, Artificial Sequence
  synthetic construct; scFv construct
gacatccagctgacacagagccctgacagcctggctgcttctctgggagagagagtgaccatcaactgcagaagctcccagaacatcttctacaacagcaacaacaagaacttcctggcctggtatcagcagaaggctggccagtctcctaagctgctgatctactgggccagcaccagagaatctggggtgccagatagattttctggcagtggctctggcacagacttcaccctgacaatcagtggactgcaggctggggatgttgctgtgtacttctgccagcagtacttcacagatgcccctacctttggtggtggcaccaaggtggaaatcaag

SEQ ID NO: 308 - DNA, 378 bp, Artificial Sequence
  synthetic construct; scFv construct
gaggtgcagctgctgcagagtggtggtggtgttgtgcagcctggtggctctctgagactgtcttgtgaagcctctggcttcaccttcagcagctacagcatgcactgggtcagacaggcccctggcaaaggactggaatggctgaccctgatcagctacaatggggtcaacaagtactatgccaagtctgtgaagggcagatttgccatcagcagagatgacagcaagtctaccctgttcctgcagatgaacagcctgaccacagatgacactgctgtgtactactgtgccagatgtcccattcctagagctgccagctacagaaatggggacaactactttgagtttggccagggcaccctggtcacagtgtcctct

SEQ ID NO: 309 - DNA, 330 bp, Artificial Sequence
  synthetic construct; scFv construct
caggctgtggtcacccaagagcctagcctgtctgtgtctcctggtggcacagtgacactgacatgtgccctgtcctctgcctctgtgtctaccagcagctaccccagctggtatcagcagacacctggccagcctccaagaatgctgatccacaacacagacaccagatcctctggggtgccagacagattctctggcagcatcctgggcaagaaggctgccctgacaatcactggtgcccaggctgatgatgagtctgactactactgtgtggtgtaccttggcaatggcttctgggtgtttggtggtggcaccaagctgacagtgctg

SEQ ID NO: 310 - DNA, 348 bp, Artificial Sequence
  synthetic construct; scFv construct
gaggtgcagctggtggaaagtggtggtggactggttcagcctggtggcagcctgagactgtcttgtgctgcctctggcttcaccttcagcatctacaccatgagctgggtcagacaggctcctggcaaaggcctggaatgggtgtcagctatcctgtctgatggcagcacctactatgctgactctgtggaaggcagattcaccatcagcagagacaacagcaagaccacactgtacctgcagatgaacagcctgacagctgaggacactgctgtgtactactgcaccaagagagtggaaggctccttcagaggctggggacagggaacactggtcactgtgtcctct

SEQ ID NO: 311 - DNA, 327 bp, Artificial Sequence
  synthetic construct; scFv construct
gagattgtgatgacacagagccctggcacactgtctctgagccctggggaatctgccacactgagctgtagagccagccagtctgtgtctaccacctacctggcctggtatcagcagaagcctggacaggctcccagactgctgatctatggggcctcttctagagccacaggcatccctgacagattttctggcagtggctctggcacagacttcaccctgaccatcagcagactggaacctgaggactttgctgtgtactactgccagcagtatggtggcagcaggctgatcacatttggccagggcacaagactggaaatcaag

SEQ ID NO: 312 - DNA, 30 bp, Artificial Sequence
  synthetic construct; linker
ggcggaggtggcagcggaggtggcggatca

SEQ ID NO: 313 - DNA, 45 bp, Artificial Sequence
  synthetic construct; linker
ggtggaggcggttcaggcggaggtggcagcggcggtggagggtcg

SEQ ID NO: 314 - DNA, 60 bp, Artificial Sequence
  synthetic construct; linker
ggtggaggcggttcaggcggaggtggcagcggcggtggagggtcaggtggaggtggatca

SEQ ID NO: 315 - DNA, 27 bp, Artificial Sequence
  synthetic construct; linker
ggcggaggaggcggaggtggaggagga

SEQ ID NO: 316 - DNA, 699 bp, Artificial Sequence
  synthetic construct; scFv construct
gagcctagaggccccaccatcaagccctgtcctccatgcaagtgtcctgctcctaacctgcttggaggcccctctgtgttcatcttcccacctaagatcaaggatgtgctgatgatctctctgagccccattgtgacctgtgtggtggtggatgtgtctgaggatgaccctgatgtgcagatctcttggtttgtgaacaatgtggaagtgcacacagcccagacacagacccacagagaggactacaacagcaccctgagagtggtgtctgccctgcctatccagcaccaggactggatgagtggcaaagagttcaagtgcaaagtgaacaacaaggacctgcctgctccaattgagagaaccatcagcaagcccaagggctctgttagagcccctcaagtgtatgtgctgcctccacctgaggaagagatgaccaagaaacaagtgaccctgacatgcatggtcacagacttcatgcctgaggacatctatgtggaatggaccaacaatggcaagacagagctgaactacaagaacactgagcctgtgctggactctgatggcagctacttcatgtacagcaagctgagggttgagaagaagaactgggttgagagaaacagctacagctgctctgtggtgcatgagggcctgcacaatcaccacaccaccaagagcttcagcagaacccctggcaag

SEQ ID NO: 317 - DNA, 1461 bp, Artificial Sequence
  synthetic construct; scFv construct
gaggtgcagctggtgcagtctggggctgaagtgaagaagcctggggagagcctgaagatcagctgcaaagtgtctggctatgacttcagcaagtactggattggctgggtcagacagatgcctggcaaaggcctggaatggatgggactgatctaccctggggactctgacaccagatacagccctagcctggaaggccaggtgtccatctctgctgacaagagcatctctgcagcctacctgcagttcagcagcctgaaggcctctgactctgccatgtactactgtgtcagaaagggctactctgcctaccttggaggatggtttgatccttggggccagggcacactggtcacagtgtcctctggcggaggtggcagcggaggtggcggatcagacatccagctgacacagagccctgacagcctggctgcttctctgggagagagagtgaccatcaactgcagaagctcccagaacatcttctacaacagcaacaacaagaacttcctggcctggtatcagcagaaggctggccagtctcctaagctgctgatctactgggccagcaccagagaatctggggtgccagatagattttctggcagtggctctggcacagacttcaccctgacaatcagtggactgcaggctggggatgttgctgtgtacttctgccagcagtacttcacagatgcccctacctttggtggtggcaccaaggtggaaatcaagggcggaggaggcggaggtggaggaggagagcctagaggccccaccatcaagccctgtcctccatgcaagtgtcctgctcctaacctgcttggaggcccctctgtgttcatcttcccacctaagatcaaggatgtgctgatgatctctctgagccccattgtgacctgtgtggtggtggatgtgtctgaggatgaccctgatgtgcagatctcttggtttgtgaacaatgtggaagtgcacacagcccagacacagacccacagagaggactacaacagcaccctgagagtggtgtctgccctgcctatccagcaccaggactggatgagtggcaaagagttcaagtgcaaagtgaacaacaaggacctgcctgctccaattgagagaaccatcagcaagcccaagggctctgttagagcccctcaagtgtatgtgctgcctccacctgaggaagagatgaccaagaaacaagtgaccctgacatgcatggtcacagacttcatgcctgaggacatctatgtggaatggaccaacaatggcaagacagagctgaactacaagaacactgagcctgtgctggactctgatggcagctacttcatgtacagcaagctgagggttgagaagaagaactgggttgagagaaacagctacagctgctctgtggtgcatgagggcctgcacaatcaccacaccaccaagagcttcagcagaacccctggcaag

SEQ ID NO: 318 - DNA, 1476 bp, Artificial Sequence
  synthetic construct; scFv construct
gaggtgcagctggtgcagtctggggctgaagtgaagaagcctggggagagcctgaagatcagctgcaaagtgtctggctatgacttcagcaagtactggattggctgggtcagacagatgcctggcaaaggcctggaatggatgggactgatctaccctggggactctgacaccagatacagccctagcctggaaggccaggtgtccatctctgctgacaagagcatctctgcagcctacctgcagttcagcagcctgaaggcctctgactctgccatgtactactgtgtcagaaagggctactctgcctaccttggaggatggtttgatccttggggccagggcacactggtcacagtgtcctctggtggaggcggttcaggcggaggtggcagcggcggtggagggtcggacatccagctgacacagagccctgacagcctggctgcttctctgggagagagagtgaccatcaactgcagaagctcccagaacatcttctacaacagcaacaacaagaacttcctggcctggtatcagcagaaggctggccagtctcctaagctgctgatctactgggccagcaccagagaatctggggtgccagatagattttctggcagtggctctggcacagacttcaccctgacaatcagtggactgcaggctggggatgttgctgtgtacttctgccagcagtacttcacagatgcccctacctttggtggtggcaccaaggtggaaatcaagggcggaggaggcggaggtggaggaggagagcctagaggccccaccatcaagccctgtcctccatgcaagtgtcctgctcctaacctgcttggaggcccctctgtgttcatcttcccacctaagatcaaggatgtgctgatgatctctctgagccccattgtgacctgtgtggtggtggatgtgtctgaggatgaccctgatgtgcagatctcttggtttgtgaacaatgtggaagtgcacacagcccagacacagacccacagagaggactacaacagcaccctgagagtggtgtctgccctgcctatccagcaccaggactggatgagtggcaaagagttcaagtgcaaagtgaacaacaaggacctgcctgctccaattgagagaaccatcagcaagcccaagggctctgttagagcccctcaagtgtatgtgctgcctccacctgaggaagagatgaccaagaaacaagtgaccctgacatgcatggtcacagacttcatgcctgaggacatctatgtggaatggaccaacaatggcaagacagagctgaactacaagaacactgagcctgtgctggactctgatggcagctacttcatgtacagcaagctgagggttgagaagaagaactgggttgagagaaacagctacagctgctctgtggtgcatgagggcctgcacaatcaccacaccaccaagagcttcagcagaacccctggcaag

SEQ ID NO: 319 - DNA, 1491 bp, Artificial Sequence
  synthetic construct; scFv construct
gaggtgcagctggtgcagtctggggctgaagtgaagaagcctggggagagcctgaagatcagctgcaaagtgtctggctatgacttcagcaagtactggattggctgggtcagacagatgcctggcaaaggcctggaatggatgggactgatctaccctggggactctgacaccagatacagccctagcctggaaggccaggtgtccatctctgctgacaagagcatctctgcagcctacctgcagttcagcagcctgaaggcctctgactctgccatgtactactgtgtcagaaagggctactctgcctaccttggaggatggtttgatccttggggccagggcacactggtcacagtgtcctctggtggaggcggttcaggcggaggtggcagcggcggtggagggtcaggtggaggtggatcagacatccagctgacacagagccctgacagcctggctgcttctctgggagagagagtgaccatcaactgcagaagctcccagaacatcttctacaacagcaacaacaagaacttcctggcctggtatcagcagaaggctggccagtctcctaagctgctgatctactgggccagcaccagagaatctggggtgccagatagattttctggcagtggctctggcacagacttcaccctgacaatcagtggactgcaggctggggatgttgctgtgtacttctgccagcagtacttcacagatgcccctacctttggtggtggcaccaaggtggaaatcaagggcggaggaggcggaggtggaggaggagagcctagaggccccaccatcaagccctgtcctccatgcaagtgtcctgctcctaacctgcttggaggcccctctgtgttcatcttcccacctaagatcaaggatgtgctgatgatctctctgagccccattgtgacctgtgtggtggtggatgtgtctgaggatgaccctgatgtgcagatctcttggtttgtgaacaatgtggaagtgcacacagcccagacacagacccacagagaggactacaacagcaccctgagagtggtgtctgccctgcctatccagcaccaggactggatgagtggcaaagagttcaagtgcaaagtgaacaacaaggacctgcctgctccaattgagagaaccatcagcaagcccaagggctctgttagagcccctcaagtgtatgtgctgcctccacctgaggaagagatgaccaagaaacaagtgaccctgacatgcatggtcacagacttcatgcctgaggacatctatgtggaatggaccaacaatggcaagacagagctgaactacaagaacactgagcctgtgctggactctgatggcagctacttcatgtacagcaagctgagggttgagaagaagaactgggttgagagaaacagctacagctgctctgtggtgcatgagggcctgcacaatcaccacaccaccaagagcttcagcagaacccctggcaag

SEQ ID NO: 320 - DNA, 1461 bp, Artificial Sequence
  synthetic construct; scFv construct
gacatccagctgacacagagccctgacagcctggctgcttctctgggagagagagtgaccatcaactgcagaagctcccagaacatcttctacaacagcaacaacaagaacttcctggcctggtatcagcagaaggctggccagtctcctaagctgctgatctactgggccagcaccagagaatctggggtgccagatagattttctggcagtggctctggcacagacttcaccctgacaatcagtggactgcaggctggggatgttgctgtgtacttctgccagcagtacttcacagatgcccctacctttggtggtggcaccaaggtggaaatcaagggcggaggtggcagcggaggtggcggatcagaggtgcagctggtgcagtctggggctgaagtgaagaagcctggggagagcctgaagatcagctgcaaagtgtctggctatgacttcagcaagtactggattggctgggtcagacagatgcctggcaaaggcctggaatggatgggactgatctaccctggggactctgacaccagatacagccctagcctggaaggccaggtgtccatctctgctgacaagagcatctctgcagcctacctgcagttcagcagcctgaaggcctctgactctgccatgtactactgtgtcagaaagggctactctgcctaccttggaggatggtttgatccttggggccagggcacactggtcacagtgtcctctggcggaggaggcggaggtggaggaggagagcctagaggccccaccatcaagccctgtcctccatgcaagtgtcctgctcctaacctgcttggaggcccctctgtgttcatcttcccacctaagatcaaggatgtgctgatgatctctctgagccccattgtgacctgtgtggtggtggatgtgtctgaggatgaccctgatgtgcagatctcttggtttgtgaacaatgtggaagtgcacacagcccagacacagacccacagagaggactacaacagcaccctgagagtggtgtctgccctgcctatccagcaccaggactggatgagtggcaaagagttcaagtgcaaagtgaacaacaaggacctgcctgctccaattgagagaaccatcagcaagcccaagggctctgttagagcccctcaagtgtatgtgctgcctccacctgaggaagagatgaccaagaaacaagtgaccctgacatgcatggtcacagacttcatgcctgaggacatctatgtggaatggaccaacaatggcaagacagagctgaactacaagaacactgagcctgtgctggactctgatggcagctacttcatgtacagcaagctgagggttgagaagaagaactgggttgagagaaacagctacagctgctctgtggtgcatgagggcctgcacaatcaccacaccaccaagagcttcagcagaacccctggcaag

SEQ ID NO: 321 - DNA, 1476 bp, Artificial Sequence
  synthetic construct; scFv construct
gacatccagctgacacagagccctgacagcctggctgcttctctgggagagagagtgaccatcaactgcagaagctcccagaacatcttctacaacagcaacaacaagaacttcctggcctggtatcagcagaaggctggccagtctcctaagctgctgatctactgggccagcaccagagaatctggggtgccagatagattttctggcagtggctctggcacagacttcaccctgacaatcagtggactgcaggctggggatgttgctgtgtacttctgccagcagtacttcacagatgcccctacctttggtggtggcaccaaggtggaaatcaagggtggaggcggttcaggcggaggtggcagcggcggtggagggtcggaggtgcagctggtgcagtctggggctgaagtgaagaagcctggggagagcctgaagatcagctgcaaagtgtctggctatgacttcagcaagtactggattggctgggtcagacagatgcctggcaaaggcctggaatggatgggactgatctaccctggggactctgacaccagatacagccctagcctggaaggccaggtgtccatctctgctgacaagagcatctctgcagcctacctgcagttcagcagcctgaaggcctctgactctgccatgtactactgtgtcagaaagggctactctgcctaccttggaggatggtttgatccttggggccagggcacactggtcacagtgtcctctggcggaggaggcggaggtggaggaggagagcctagaggccccaccatcaagccctgtcctccatgcaagtgtcctgctcctaacctgcttggaggcccctctgtgttcatcttcccacctaagatcaaggatgtgctgatgatctctctgagccccattgtgacctgtgtggtggtggatgtgtctgaggatgaccctgatgtgcagatctcttggtttgtgaacaatgtggaagtgcacacagcccagacacagacccacagagaggactacaacagcaccctgagagtggtgtctgccctgcctatccagcaccaggactggatgagtggcaaagagttcaagtgcaaagtgaacaacaaggacctgcctgctccaattgagagaaccatcagcaagcccaagggctctgttagagcccctcaagtgtatgtgctgcctccacctgaggaagagatgaccaagaaacaagtgaccctgacatgcatggtcacagacttcatgcctgaggacatctatgtggaatggaccaacaatggcaagacagagctgaactacaagaacactgagcctgtgctggactctgatggcagctacttcatgtacagcaagctgagggttgagaagaagaactgggttgagagaaacagctacagctgctctgtggtgcatgagggcctgcacaatcaccacaccaccaagagcttcagcagaacccctggcaag

SEQ ID NO: 322 - DNA, 1491 bp, Artificial Sequence
  synthetic construct; scFv construct
gacatccagctgacacagagccctgacagcctggctgcttctctgggagagagagtgaccatcaactgcagaagctcccagaacatcttctacaacagcaacaacaagaacttcctggcctggtatcagcagaaggctggccagtctcctaagctgctgatctactgggccagcaccagagaatctggggtgccagatagattttctggcagtggctctggcacagacttcaccctgacaatcagtggactgcaggctggggatgttgctgtgtacttctgccagcagtacttcacagatgcccctacctttggtggtggcaccaaggtggaaatcaagggtggaggcggttcaggcggaggtggcagcggcggtggagggtcaggtggaggtggatcagaggtgcagctggtgcagtctggggctgaagtgaagaagcctggggagagcctgaagatcagctgcaaagtgtctggctatgacttcagcaagtactggattggctgggtcagacagatgcctggcaaaggcctggaatggatgggactgatctaccctggggactctgacaccagatacagccctagcctggaaggccaggtgtccatctctgctgacaagagcatctctgcagcctacctgcagttcagcagcctgaaggcctctgactctgccatgtactactgtgtcagaaagggctactctgcctaccttggaggatggtttgatccttggggccagggcacactggtcacagtgtcctctggcggaggaggcggaggtggaggaggagagcctagaggccccaccatcaagccctgtcctccatgcaagtgtcctgctcctaacctgcttggaggcccctctgtgttcatcttcccacctaagatcaaggatgtgctgatgatctctctgagccccattgtgacctgtgtggtggtggatgtgtctgaggatgaccctgatgtgcagatctcttggtttgtgaacaatgtggaagtgcacacagcccagacacagacccacagagaggactacaacagcaccctgagagtggtgtctgccctgcctatccagcaccaggactggatgagtggcaaagagttcaagtgcaaagtgaacaacaaggacctgcctgctccaattgagagaaccatcagcaagcccaagggctctgttagagcccctcaagtgtatgtgctgcctccacctgaggaagagatgaccaagaaacaagtgaccctgacatgcatggtcacagacttcatgcctgaggacatctatgtggaatggaccaacaatggcaagacagagctgaactacaagaacactgagcctgtgctggactctgatggcagctacttcatgtacagcaagctgagggttgagaagaagaactgggttgagagaaacagctacagctgctctgtggtgcatgagggcctgcacaatcaccacaccaccaagagcttcagcagaacccctggcaag

SEQ ID NO: 323 - DNA, 1464 bp, Artificial Sequence
  synthetic construct; scFv construct
gaggtgcagctgctgcagagtggtggtggtgttgtgcagcctggtggctctctgagactgtcttgtgaagcctctggcttcaccttcagcagctacagcatgcactgggtcagacaggcccctggcaaaggactggaatggctgaccctgatcagctacaatggggtcaacaagtactatgccaagtctgtgaagggcagatttgccatcagcagagatgacagcaagtctaccctgttcctgcagatgaacagcctgaccacagatgacactgctgtgtactactgtgccagatgtcccattcctagagctgccagctacagaaatggggacaactactttgagtttggccagggcaccctggtcacagtgtcctctggcggaggtggcagcggaggtggcggatcacaggctgtggtcacccaagagcctagcctgtctgtgtctcctggtggcacagtgacactgacatgtgccctgtcctctgcctctgtgtctaccagcagctaccccagctggtatcagcagacacctggccagcctccaagaatgctgatccacaacacagacaccagatcctctggggtgccagacagattctctggcagcatcctgggcaagaaggctgccctgacaatcactggtgcccaggctgatgatgagtctgactactactgtgtggtgtaccttggcaatggcttctgggtgtttggtggtggcaccaagctgacagtgctgggcggaggaggcggaggtggaggaggagagcctagaggccccaccatcaagccctgtcctccatgcaagtgtcctgctcctaacctgcttggaggcccctctgtgttcatcttcccacctaagatcaaggatgtgctgatgatctctctgagccccattgtgacctgtgtggtggtggatgtgtctgaggatgaccctgatgtgcagatctcttggtttgtgaacaatgtggaagtgcacacagcccagacacagacccacagagaggactacaacagcaccctgagagtggtgtctgccctgcctatccagcaccaggactggatgagtggcaaagagttcaagtgcaaagtgaacaacaaggacctgcctgctccaattgagagaaccatcagcaagcccaagggctctgttagagcccctcaagtgtatgtgctgcctccacctgaggaagagatgaccaagaaacaagtgaccctgacatgcatggtcacagacttcatgcctgaggacatctatgtggaatggaccaacaatggcaagacagagctgaactacaagaacactgagcctgtgctggactctgatggcagctacttcatgtacagcaagctgagggttgagaagaagaactgggttgagagaaacagctacagctgctctgtggtgcatgagggcctgcacaatcaccacaccaccaagagcttcagcagaacccctggcaag

SEQ ID NO: 324 - DNA, 1479 bp, Artificial Sequence
  synthetic construct; scFv construct
gaggtgcagctgctgcagagtggtggtggtgttgtgcagcctggtggctctctgagactgtcttgtgaagcctctggcttcaccttcagcagctacagcatgcactgggtcagacaggcccctggcaaaggactggaatggctgaccctgatcagctacaatggggtcaacaagtactatgccaagtctgtgaagggcagatttgccatcagcagagatgacagcaagtctaccctgttcctgcagatgaacagcctgaccacagatgacactgctgtgtactactgtgccagatgtcccattcctagagctgccagctacagaaatggggacaactactttgagtttggccagggcaccctggtcacagtgtcctctggtggaggcggttcaggcggaggtggcagcggcggtggagggtcgcaggctgtggtcacccaagagcctagcctgtctgtgtctcctggtggcacagtgacactgacatgtgccctgtcctctgcctctgtgtctaccagcagctaccccagctggtatcagcagacacctggccagcctccaagaatgctgatccacaacacagacaccagatcctctggggtgccagacagattctctggcagcatcctgggcaagaaggctgccctgacaatcactggtgcccaggctgatgatgagtctgactactactgtgtggtgtaccttggcaatggcttctgggtgtttggtggtggcaccaagctgacagtgctgggcggaggaggcggaggtggaggaggagagcctagaggccccaccatcaagccctgtcctccatgcaagtgtcctgctcctaacctgcttggaggcccctctgtgttcatcttcccacctaagatcaaggatgtgctgatgatctctctgagccccattgtgacctgtgtggtggtggatgtgtctgaggatgaccctgatgtgcagatctcttggtttgtgaacaatgtggaagtgcacacagcccagacacagacccacagagaggactacaacagcaccctgagagtggtgtctgccctgcctatccagcaccaggactggatgagtggcaaagagttcaagtgcaaagtgaacaacaaggacctgcctgctccaattgagagaaccatcagcaagcccaagggctctgttagagcccctcaagtgtatgtgctgcctccacctgaggaagagatgaccaagaaacaagtgaccctgacatgcatggtcacagacttcatgcctgaggacatctatgtggaatggaccaacaatggcaagacagagctgaactacaagaacactgagcctgtgctggactctgatggcagctacttcatgtacagcaagctgagggttgagaagaagaactgggttgagagaaacagctacagctgctctgtggtgcatgagggcctgcacaatcaccacaccaccaagagcttcagcagaacccctggcaag

SEQ ID NO: 325 - DNA, 1494 bp, Artificial Sequence
  synthetic construct; scFv construct
gaggtgcagctgctgcagagtggtggtggtgttgtgcagcctggtggctctctgagactgtcttgtgaagcctctggcttcaccttcagcagctacagcatgcactgggtcagacaggcccctggcaaaggactggaatggctgaccctgatcagctacaatggggtcaacaagtactatgccaagtctgtgaagggcagatttgccatcagcagagatgacagcaagtctaccctgttcctgcagatgaacagcctgaccacagatgacactgctgtgtactactgtgccagatgtcccattcctagagctgccagctacagaaatggggacaactactttgagtttggccagggcaccctggtcacagtgtcctctggtggaggcggttcaggcggaggtggcagcggcggtggagggtcaggtggaggtggatcacaggctgtggtcacccaagagcctagcctgtctgtgtctcctggtggcacagtgacactgacatgtgccctgtcctctgcctctgtgtctaccagcagctaccccagctggtatcagcagacacctggccagcctccaagaatgctgatccacaacacagacaccagatcctctggggtgccagacagattctctggcagcatcctgggcaagaaggctgccctgacaatcactggtgcccaggctgatgatgagtctgactactactgtgtggtgtaccttggcaatggcttctgggtgtttggtggtggcaccaagctgacagtgctgggcggaggaggcggaggtggaggaggagagcctagaggccccaccatcaagccctgtcctccatgcaagtgtcctgctcctaacctgcttggaggcccctctgtgttcatcttcccacctaagatcaaggatgtgctgatgatctctctgagccccattgtgacctgtgtggtggtggatgtgtctgaggatgaccctgatgtgcagatctcttggtttgtgaacaatgtggaagtgcacacagcccagacacagacccacagagaggactacaacagcaccctgagagtggtgtctgccctgcctatccagcaccaggactggatgagtggcaaagagttcaagtgcaaagtgaacaacaaggacctgcctgctccaattgagagaaccatcagcaagcccaagggctctgttagagcccctcaagtgtatgtgctgcctccacctgaggaagagatgaccaagaaacaagtgaccctgacatgcatggtcacagacttcatgcctgaggacatctatgtggaatggaccaacaatggcaagacagagctgaactacaagaacactgagcctgtgctggactctgatggcagctacttcatgtacagcaagctgagggttgagaagaagaactgggttgagagaaacagctacagctgctctgtggtgcatgagggcctgcacaatcaccacaccaccaagagcttcagcagaacccctggcaag

SEQ ID NO: 326 - DNA, 1464 bp, Artificial Sequence
  synthetic construct; scFv construct
caggctgtggtcacccaagagcctagcctgtctgtgtctcctggtggcacagtgacactgacatgtgccctgtcctctgcctctgtgtctaccagcagctaccccagctggtatcagcagacacctggccagcctccaagaatgctgatccacaacacagacaccagatcctctggggtgccagacagattctctggcagcatcctgggcaagaaggctgccctgacaatcactggtgcccaggctgatgatgagtctgactactactgtgtggtgtaccttggcaatggcttctgggtgtttggtggtggcaccaagctgacagtgctgggcggaggtggcagcggaggtggcggatcagaggtgcagctgctgcagagtggtggtggtgttgtgcagcctggtggctctctgagactgtcttgtgaagcctctggcttcaccttcagcagctacagcatgcactgggtcagacaggcccctggcaaaggactggaatggctgaccctgatcagctacaatggggtcaacaagtactatgccaagtctgtgaagggcagatttgccatcagcagagatgacagcaagtctaccctgttcctgcagatgaacagcctgaccacagatgacactgctgtgtactactgtgccagatgtcccattcctagagctgccagctacagaaatggggacaactactttgagtttggccagggcaccctggtcacagtgtcctctggcggaggaggcggaggtggaggaggagagcctagaggccccaccatcaagccctgtcctccatgcaagtgtcctgctcctaacctgcttggaggcccctctgtgttcatcttcccacctaagatcaaggatgtgctgatgatctctctgagccccattgtgacctgtgtggtggtggatgtgtctgaggatgaccctgatgtgcagatctcttggtttgtgaacaatgtggaagtgcacacagcccagacacagacccacagagaggactacaacagcaccctgagagtggtgtctgccctgcctatccagcaccaggactggatgagtggcaaagagttcaagtgcaaagtgaacaacaaggacctgcctgctccaattgagagaaccatcagcaagcccaagggctctgttagagcccctcaagtgtatgtgctgcctccacctgaggaagagatgaccaagaaacaagtgaccctgacatgcatggtcacagacttcatgcctgaggacatctatgtggaatggaccaacaatggcaagacagagctgaactacaagaacactgagcctgtgctggactctgatggcagctacttcatgtacagcaagctgagggttgagaagaagaactgggttgagagaaacagctacagctgctctgtggtgcatgagggcctgcacaatcaccacaccaccaagagcttcagcagaacccctggcaag

SEQ ID NO: 327 - DNA, 1479 bp, Artificial Sequence
  synthetic construct; scFv construct
caggctgtggtcacccaagagcctagcctgtctgtgtctcctggtggcacagtgacactgacatgtgccctgtcctctgcctctgtgtctaccagcagctaccccagctggtatcagcagacacctggccagcctccaagaatgctgatccacaacacagacaccagatcctctggggtgccagacagattctctggcagcatcctgggcaagaaggctgccctgacaatcactggtgcccaggctgatgatgagtctgactactactgtgtggtgtaccttggcaatggcttctgggtgtttggtggtggcaccaagctgacagtgctgggtggaggcggttcaggcggaggtggcagcggcggtggagggtcggaggtgcagctgctgcagagtggtggtggtgttgtgcagcctggtggctctctgagactgtcttgtgaagcctctggcttcaccttcagcagctacagcatgcactgggtcagacaggcccctggcaaaggactggaatggctgaccctgatcagctacaatggggtcaacaagtactatgccaagtctgtgaagggcagatttgccatcagcagagatgacagcaagtctaccctgttcctgcagatgaacagcctgaccacagatgacactgctgtgtactactgtgccagatgtcccattcctagagctgccagctacagaaatggggacaactactttgagtttggccagggcaccctggtcacagtgtcctctggcggaggaggcggaggtggaggaggagagcctagaggccccaccatcaagccctgtcctccatgcaagtgtcctgctcctaacctgcttggaggcccctctgtgttcatcttcccacctaagatcaaggatgtgctgatgatctctctgagccccattgtgacctgtgtggtggtggatgtgtctgaggatgaccctgatgtgcagatctcttggtttgtgaacaatgtggaagtgcacacagcccagacacagacccacagagaggactacaacagcaccctgagagtggtgtctgccctgcctatccagcaccaggactggatgagtggcaaagagttcaagtgcaaagtgaacaacaaggacctgcctgctccaattgagagaaccatcagcaagcccaagggctctgttagagcccctcaagtgtatgtgctgcctccacctgaggaagagatgaccaagaaacaagtgaccctgacatgcatggtcacagacttcatgcctgaggacatctatgtggaatggaccaacaatggcaagacagagctgaactacaagaacactgagcctgtgctggactctgatggcagctacttcatgtacagcaagctgagggttgagaagaagaactgggttgagagaaacagctacagctgctctgtggtgcatgagggcctgcacaatcaccacaccaccaagagcttcagcagaacccctggcaag

SEQ ID NO: 328 - DNA, 1494 bp, Artificial Sequence
  synthetic construct; scFv construct
caggctgtggtcacccaagagcctagcctgtctgtgtctcctggtggcacagtgacactgacatgtgccctgtcctctgcctctgtgtctaccagcagctaccccagctggtatcagcagacacctggccagcctccaagaatgctgatccacaacacagacaccagatcctctggggtgccagacagattctctggcagcatcctgggcaagaaggctgccctgacaatcactggtgcccaggctgatgatgagtctgactactactgtgtggtgtaccttggcaatggcttctgggtgtttggtggtggcaccaagctgacagtgctgggtggaggcggttcaggcggaggtggcagcggcggtggagggtcaggtggaggtggatcagaggtgcagctgctgcagagtggtggtggtgttgtgcagcctggtggctctctgagactgtcttgtgaagcctctggcttcaccttcagcagctacagcatgcactgggtcagacaggcccctggcaaaggactggaatggctgaccctgatcagctacaatggggtcaacaagtactatgccaagtctgtgaagggcagatttgccatcagcagagatgacagcaagtctaccctgttcctgcagatgaacagcctgaccacagatgacactgctgtgtactactgtgccagatgtcccattcctagagctgccagctacagaaatggggacaactactttgagtttggccagggcaccctggtcacagtgtcctctggcggaggaggcggaggtggaggaggagagcctagaggccccaccatcaagccctgtcctccatgcaagtgtcctgctcctaacctgcttggaggcccctctgtgttcatcttcccacctaagatcaaggatgtgctgatgatctctctgagccccattgtgacctgtgtggtggtggatgtgtctgaggatgaccctgatgtgcagatctcttggtttgtgaacaatgtggaagtgcacacagcccagacacagacccacagagaggactacaacagcaccctgagagtggtgtctgccctgcctatccagcaccaggactggatgagtggcaaagagttcaagtgcaaagtgaacaacaaggacctgcctgctccaattgagagaaccatcagcaagcccaagggctctgttagagcccctcaagtgtatgtgctgcctccacctgaggaagagatgaccaagaaacaagtgaccctgacatgcatggtcacagacttcatgcctgaggacatctatgtggaatggaccaacaatggcaagacagagctgaactacaagaacactgagcctgtgctggactctgatggcagctacttcatgtacagcaagctgagggttgagaagaagaactgggttgagagaaacagctacagctgctctgtggtgcatgagggcctgcacaatcaccacaccaccaagagcttcagcagaacccctggcaag

SEQ ID NO: 329 - DNA, 1431 bp, Artificial Sequence
  synthetic construct; scFv construct
gaggtgcagctggtggaaagtggtggtggactggttcagcctggtggcagcctgagactgtcttgtgctgcctctggcttcaccttcagcatctacaccatgagctgggtcagacaggctcctggcaaaggcctggaatgggtgtcagctatcctgtctgatggcagcacctactatgctgactctgtggaaggcagattcaccatcagcagagacaacagcaagaccacactgtacctgcagatgaacagcctgacagctgaggacactgctgtgtactactgcaccaagagagtggaaggctccttcagaggctggggacagggaacactggtcactgtgtcctctggcggaggtggcagcggaggtggcggatcagagattgtgatgacacagagccctggcacactgtctctgagccctggggaatctgccacactgagctgtagagccagccagtctgtgtctaccacctacctggcctggtatcagcagaagcctggacaggctcccagactgctgatctatggggcctcttctagagccacaggcatccctgacagattttctggcagtggctctggcacagacttcaccctgaccatcagcagactggaacctgaggactttgctgtgtactactgccagcagtatggtggcagcaggctgatcacatttggccagggcacaagactggaaatcaagggcggaggaggcggaggtggaggaggagagcctagaggccccaccatcaagccctgtcctccatgcaagtgtcctgctcctaacctgcttggaggcccctctgtgttcatcttcccacctaagatcaaggatgtgctgatgatctctctgagccccattgtgacctgtgtggtggtggatgtgtctgaggatgaccctgatgtgcagatctcttggtttgtgaacaatgtggaagtgcacacagcccagacacagacccacagagaggactacaacagcaccctgagagtggtgtctgccctgcctatccagcaccaggactggatgagtggcaaagagttcaagtgcaaagtgaacaacaaggacctgcctgctccaattgagagaaccatcagcaagcccaagggctctgttagagcccctcaagtgtatgtgctgcctccacctgaggaagagatgaccaagaaacaagtgaccctgacatgcatggtcacagacttcatgcctgaggacatctatgtggaatggaccaacaatggcaagacagagctgaactacaagaacactgagcctgtgctggactctgatggcagctacttcatgtacagcaagctgagggttgagaagaagaactgggttgagagaaacagctacagctgctctgtggtgcatgagggcctgcacaatcaccacaccaccaagagcttcagcagaacccctggcaag

SEQ ID NO: 330 - DNA, 1446 bp, Artificial Sequence
  synthetic construct; scFv construct
gaggtgcagctggtggaaagtggtggtggactggttcagcctggtggcagcctgagactgtcttgtgctgcctctggcttcaccttcagcatctacaccatgagctgggtcagacaggctcctggcaaaggcctggaatgggtgtcagctatcctgtctgatggcagcacctactatgctgactctgtggaaggcagattcaccatcagcagagacaacagcaagaccacactgtacctgcagatgaacagcctgacagctgaggacactgctgtgtactactgcaccaagagagtggaaggctccttcagaggctggggacagggaacactggtcactgtgtcctctggtggaggcggttcaggcggaggtggcagcggcggtggagggtcggagattgtgatgacacagagccctggcacactgtctctgagccctggggaatctgccacactgagctgtagagccagccagtctgtgtctaccacctacctggcctggtatcagcagaagcctggacaggctcccagactgctgatctatggggcctcttctagagccacaggcatccctgacagattttctggcagtggctctggcacagacttcaccctgaccatcagcagactggaacctgaggactttgctgtgtactactgccagcagtatggtggcagcaggctgatcacatttggccagggcacaagactggaaatcaagggcggaggaggcggaggtggaggaggagagcccaggggccccaccatcaagccctgccccccctgtaagtgtccagctcccaacctgctgggcggacccagcgtgttcatcttcccccccaagatcaaggacgtgctgatgatcagcctgagccccatcgtgacctgcgtggtggtggacgtgagcgaggacgaccccgacgtgcagatcagctggttcgtgaacaacgtggaggtgcacaccgcccagacccagacccacagagaggactacaactctactctgagggtcgtgtccgccctgcccatccagcaccaggactggatgagcggcaaagagttcaagtgcaaggtcaacaacaaggacctgccagcccccatcgagaggaccatcagcaagcccaagggcagcgtgagagccccacaggtctacgtgctgcccccacccgaggaagagatgaccaagaagcaggtcacactgacctgcatggtgaccgacttcatgcccgaggacatctacgtggagtggaccaacaacggcaagaccgagctgaactacaagaacaccgagccagtgctggacagcgacggcagctacttcatgtacagcaagctgagggtggagaagaagaactgggtcgagaggaacagctacagctgcagcgtggtgcacgagggcctgcacaaccaccacaccaccaagagcttcagcaggacccccggcaag

SEQ ID NO: 331 - DNA, 1461 bp, Artificial Sequence
  synthetic construct; scFv construct
gaggtgcagctggtggaaagtggtggtggactggttcagcctggtggcagcctgagactgtcttgtgctgcctctggcttcaccttcagcatctacaccatgagctgggtcagacaggctcctggcaaaggcctggaatgggtgtcagctatcctgtctgatggcagcacctactatgctgactctgtggaaggcagattcaccatcagcagagacaacagcaagaccacactgtacctgcagatgaacagcctgacagctgaggacactgctgtgtactactgcaccaagagagtggaaggctccttcagaggctggggacagggaacactggtcactgtgtcctctggtggaggcggttcaggcggaggtggcagcggcggtggagggtcaggtggaggtggatcagagattgtgatgacacagagccctggcacactgtctctgagccctggggaatctgccacactgagctgtagagccagccagtctgtgtctaccacctacctggcctggtatcagcagaagcctggacaggctcccagactgctgatctatggggcctcttctagagccacaggcatccctgacagattttctggcagtggctctggcacagacttcaccctgaccatcagcagactggaacctgaggactttgctgtgtactactgccagcagtatggtggcagcaggctgatcacatttggccagggcacaagactggaaatcaagggcggaggaggcggaggtggaggaggagagcctagaggccccaccatcaagccctgtcctccatgcaagtgtcctgctcctaacctgcttggaggcccctctgtgttcatcttcccacctaagatcaaggatgtgctgatgatctctctgagccccattgtgacctgtgtggtggtggatgtgtctgaggatgaccctgatgtgcagatctcttggtttgtgaacaatgtggaagtgcacacagcccagacacagacccacagagaggactacaacagcaccctgagagtggtgtctgccctgcctatccagcaccaggactggatgagtggcaaagagttcaagtgcaaagtgaacaacaaggacctgcctgctccaattgagagaaccatcagcaagcccaagggctctgttagagcccctcaagtgtatgtgctgcctccacctgaggaagagatgaccaagaaacaagtgaccctgacatgcatggtcacagacttcatgcctgaggacatctatgtggaatggaccaacaatggcaagacagagctgaactacaagaacactgagcctgtgctggactctgatggcagctacttcatgtacagcaagctgagggttgagaagaagaactgggttgagagaaacagctacagctgctctgtggtgcatgagggcctgcacaatcaccacaccaccaagagcttcagcagaacccctggcaag

SEQ ID NO: 332 - DNA, 1431 bp, Artificial Sequence
  synthetic construct; scFv construct
gagattgtgatgacacagagccctggcacactgtctctgagccctggggaatctgccacactgagctgtagagccagccagtctgtgtctaccacctacctggcctggtatcagcagaagcctggacaggctcccagactgctgatctatggggcctcttctagagccacaggcatccctgacagattttctggcagtggctctggcacagacttcaccctgaccatcagcagactggaacctgaggactttgctgtgtactactgccagcagtatggtggcagcaggctgatcacatttggccagggcacaagactggaaatcaagggcggaggtggcagcggaggtggcggatcagaggtgcagctggtggaaagtggtggtggactggttcagcctggtggcagcctgagactgtcttgtgctgcctctggcttcaccttcagcatctacaccatgagctgggtcagacaggctcctggcaaaggcctggaatgggtgtcagctatcctgtctgatggcagcacctactatgctgactctgtggaaggcagattcaccatcagcagagacaacagcaagaccacactgtacctgcagatgaacagcctgacagctgaggacactgctgtgtactactgcaccaagagagtggaaggctccttcagaggctggggacagggaacactggtcactgtgtcctctggcggaggaggcggaggtggaggaggagagcctagaggccccaccatcaagccctgtcctccatgcaagtgtcctgctcctaacctgcttggaggcccctctgtgttcatcttcccacctaagatcaaggatgtgctgatgatctctctgagccccattgtgacctgtgtggtggtggatgtgtctgaggatgaccctgatgtgcagatctcttggtttgtgaacaatgtggaagtgcacacagcccagacacagacccacagagaggactacaacagcaccctgagagtggtgtctgccctgcctatccagcaccaggactggatgagtggcaaagagttcaagtgcaaagtgaacaacaaggacctgcctgctccaattgagagaaccatcagcaagcccaagggctctgttagagcccctcaagtgtatgtgctgcctccacctgaggaagagatgaccaagaaacaagtgaccctgacatgcatggtcacagacttcatgcctgaggacatctatgtggaatggaccaacaatggcaagacagagctgaactacaagaacactgagcctgtgctggactctgatggcagctacttcatgtacagcaagctgagggttgagaagaagaactgggttgagagaaacagctacagctgctctgtggtgcatgagggcctgcacaatcaccacaccaccaagagcttcagcagaacccctggcaag

SEQ ID NO: 333 - DNA, 1446 bp, Artificial Sequence
  synthetic construct; scFv construct
gagattgtgatgacacagagccctggcacactgtctctgagccctggggaatctgccacactgagctgtagagccagccagtctgtgtctaccacctacctggcctggtatcagcagaagcctggacaggctcccagactgctgatctatggggcctcttctagagccacaggcatccctgacagattttctggcagtggctctggcacagacttcaccctgaccatcagcagactggaacctgaggactttgctgtgtactactgccagcagtatggtggcagcaggctgatcacatttggccagggcacaagactggaaatcaagggtggaggcggttcaggcggaggtggcagcggcggtggagggtcggaggtgcagctggtggaaagtggtggtggactggttcagcctggtggcagcctgagactgtcttgtgctgcctctggcttcaccttcagcatctacaccatgagctgggtcagacaggctcctggcaaaggcctggaatgggtgtcagctatcctgtctgatggcagcacctactatgctgactctgtggaaggcagattcaccatcagcagagacaacagcaagaccacactgtacctgcagatgaacagcctgacagctgaggacactgctgtgtactactgcaccaagagagtggaaggctccttcagaggctggggacagggaacactggtcactgtgtcctctggcggaggaggcggaggtggaggaggagagcctagaggccccaccatcaagccctgtcctccatgcaagtgtcctgctcctaacctgcttggaggcccctctgtgttcatcttcccacctaagatcaaggatgtgctgatgatctctctgagccccattgtgacctgtgtggtggtggatgtgtctgaggatgaccctgatgtgcagatctcttggtttgtgaacaatgtggaagtgcacacagcccagacacagacccacagagaggactacaacagcaccctgagagtggtgtctgccctgcctatccagcaccaggactggatgagtggcaaagagttcaagtgcaaagtgaacaacaaggacctgcctgctccaattgagagaaccatcagcaagcccaagggctctgttagagcccctcaagtgtatgtgctgcctccacctgaggaagagatgaccaagaaacaagtgaccctgacatgcatggtcacagacttcatgcctgaggacatctatgtggaatggaccaacaatggcaagacagagctgaactacaagaacactgagcctgtgctggactctgatggcagctacttcatgtacagcaagctgagggttgagaagaagaactgggttgagagaaacagctacagctgctctgtggtgcatgagggcctgcacaatcaccacaccaccaagagcttcagcagaacccctggcaag

SEQ ID NO: 334 - DNA, 1461 bp, Artificial Sequence
  synthetic construct; scFv construct
gagattgtgatgacacagagccctggcacactgtctctgagccctggggaatctgccacactgagctgtagagccagccagtctgtgtctaccacctacctggcctggtatcagcagaagcctggacaggctcccagactgctgatctatggggcctcttctagagccacaggcatccctgacagattttctggcagtggctctggcacagacttcaccctgaccatcagcagactggaacctgaggactttgctgtgtactactgccagcagtatggtggcagcaggctgatcacatttggccagggcacaagactggaaatcaagggtggaggcggttcaggcggaggtggcagcggcggtggagggtcaggtggaggtggatcagaggtgcagctggtggaaagtggtggtggactggttcagcctggtggcagcctgagactgtcttgtgctgcctctggcttcaccttcagcatctacaccatgagctgggtcagacaggctcctggcaaaggcctggaatgggtgtcagctatcctgtctgatggcagcacctactatgctgactctgtggaaggcagattcaccatcagcagagacaacagcaagaccacactgtacctgcagatgaacagcctgacagctgaggacactgctgtgtactactgcaccaagagagtggaaggctccttcagaggctggggacagggaacactggtcactgtgtcctctggcggaggaggcggaggtggaggaggagagcctagaggccccaccatcaagccctgtcctccatgcaagtgtcctgctcctaacctgcttggaggcccctctgtgttcatcttcccacctaagatcaaggatgtgctgatgatctctctgagccccattgtgacctgtgtggtggtggatgtgtctgaggatgaccctgatgtgcagatctcttggtttgtgaacaatgtggaagtgcacacagcccagacacagacccacagagaggactacaacagcaccctgagagtggtgtctgccctgcctatccagcaccaggactggatgagtggcaaagagttcaagtgcaaagtgaacaacaaggacctgcctgctccaattgagagaaccatcagcaagcccaagggctctgttagagcccctcaagtgtatgtgctgcctccacctgaggaagagatgaccaagaaacaagtgaccctgacatgcatggtcacagacttcatgcctgaggacatctatgtggaatggaccaacaatggcaagacagagctgaactacaagaacactgagcctgtgctggactctgatggcagctacttcatgtacagcaagctgagggttgagaagaagaactgggttgagagaaacagctacagctgctctgtggtgcatgagggcctgcacaatcaccacaccaccaagagcttcagcagaacccctggcaag

SEQ ID NO: 335 - DNA, 1488 bp, Artificial Sequence
  synthetic construct; scFv construct
caggtccagctgcaagagtctggccctggactggtcaagccttctggcacactgagcctgacctgtgctgtgactggtggcagcatcagcagcagcaattggtggtcttgggtcagacagagccctggcaaaggcctggaatggattggagagatccaccatgatggcaacctgaactacaaccctctgctgaagtccagagtgtccatgagcctggacagaagcaagaaccagttcagcctgaagctgacctctgtgacagctgctgacactgctgtgtactactgtgccagatgggacttcttctttgactcctcctactacatcaggggctttgacctgtggggccagggcacaatggttacagtgtcctctggtggaggcggttcaggcggaggtggcagcggcggtggagggtcaggtggaggtggatcagagacaaccctgacacagagccctggcacattgtctctgagccctggggagagagtgaccctgtcttgtagagccagccagtctgtggacagaaactacctggcctggtatcagcagaagcctggccagtctcctagactgctgatctactctgcctctaggagagccacaggcatccctgacagattttctggcagtggctctggcacagacttcaccctgaccatcagcagactggaacctgaggactttgtggtgtactactgccagcagtatggtggcagccctcctatcacatttggccagggcacaagactggaaatcaagggcggaggaggcggaggtggaggaggagagcctagaggccccaccatcaagccctgtcctccatgcaagtgtcctgctcctaacctgcttggaggcccctctgtgttcatcttcccacctaagatcaaggatgtgctgatgatctctctgagccccattgtgacctgtgtggtggtggatgtgtctgaggatgaccctgatgtgcagatctcttggtttgtgaacaatgtggaagtgcacacagcccagacacagacccacagagaggactacaacagcaccctgagagtggtgtctgccctgcctatccagcaccaggactggatgagtggcaaagagttcaagtgcaaagtgaacaacaaggacctgcctgctccaattgagagaaccatcagcaagcccaagggctctgttagagcccctcaagtgtatgtgctgcctccacctgaggaagagatgaccaagaaacaagtgaccctgacatgcatggtcacagacttcatgcctgaggacatctatgtggaatggaccaacaatggcaagacagagctgaactacaagaacactgagcctgtgctggactctgatggcagctacttcatgtacagcaagctgagggttgagaagaagaactgggttgagagaaacagctacagctgctctgtggtgcatgagggcctgcacaatcaccacaccaccaagagcttcagcagaacccctggcaag

SEQ ID NO: 336 - DNA, 1473 bp, Artificial Sequence
  synthetic construct; scFv construct
caggtccagctgcaagagtctggccctggactggtcaagccttctggcacactgagcctgacctgtgctgtgactggtggcagcatcagcagcagcaattggtggtcttgggtcagacagagccctggcaaaggcctggaatggattggagagatccaccatgatggcaacctgaactacaaccctctgctgaagtccagagtgtccatgagcctggacagaagcaagaaccagttcagcctgaagctgacctctgtgacagctgctgacactgctgtgtactactgtgccagatgggacttcttctttgactcctcctactacatcaggggctttgacctgtggggccagggcacaatggttacagtgtcctctggtggaggcggttcaggcggaggtggcagcggcggtggagggtcggagacaaccctgacacagagccctggcacattgtctctgagccctggggagagagtgaccctgtcttgtagagccagccagtctgtggacagaaactacctggcctggtatcagcagaagcctggccagtctcctagactgctgatctactctgcctctaggagagccacaggcatccctgacagattttctggcagtggctctggcacagacttcaccctgaccatcagcagactggaacctgaggactttgtggtgtactactgccagcagtatggtggcagccctcctatcacatttggccagggcacaagactggaaatcaagggcggaggaggcggaggtggaggaggagagcctagaggccccaccatcaagccctgtcctccatgcaagtgtcctgctcctaacctgcttggaggcccctctgtgttcatcttcccacctaagatcaaggatgtgctgatgatctctctgagccccattgtgacctgtgtggtggtggatgtgtctgaggatgaccctgatgtgcagatctcttggtttgtgaacaatgtggaagtgcacacagcccagacacagacccacagagaggactacaacagcaccctgagagtggtgtctgccctgcctatccagcaccaggactggatgagtggcaaagagttcaagtgcaaagtgaacaacaaggacctgcctgctccaattgagagaaccatcagcaagcccaagggctctgttagagcccctcaagtgtatgtgctgcctccacctgaggaagagatgaccaagaaacaagtgaccctgacatgcatggtcacagacttcatgcctgaggacatctatgtggaatggaccaacaatggcaagacagagctgaactacaagaacactgagcctgtgctggactctgatggcagctacttcatgtacagcaagctgagggttgagaagaagaactgggttgagagaaacagctacagctgctctgtggtgcatgagggcctgcacaatcaccacaccaccaagagcttcagcagaacccctggcaag

SEQ ID NO: 337 - DNA, 1458 bp, Artificial Sequence
  synthetic construct; scFv construct
caggtccagctgcaagagtctggccctggactggtcaagccttctggcacactgagcctgacctgtgctgtgactggtggcagcatcagcagcagcaattggtggtcttgggtcagacagagccctggcaaaggcctggaatggattggagagatccaccatgatggcaacctgaactacaaccctctgctgaagtccagagtgtccatgagcctggacagaagcaagaaccagttcagcctgaagctgacctctgtgacagctgctgacactgctgtgtactactgtgccagatgggacttcttctttgactcctcctactacatcaggggctttgacctgtggggccagggcacaatggttacagtgtcctctggcggaggtggcagcggaggtggcggatcagagacaaccctgacacagagccctggcacattgtctctgagccctggggagagagtgaccctgtcttgtagagccagccagtctgtggacagaaactacctggcctggtatcagcagaagcctggccagtctcctagactgctgatctactctgcctctaggagagccacaggcatccctgacagattttctggcagtggctctggcacagacttcaccctgaccatcagcagactggaacctgaggactttgtggtgtactactgccagcagtatggtggcagccctcctatcacatttggccagggcacaagactggaaatcaagggcggaggaggcggaggtggaggaggagagcctagaggccccaccatcaagccctgtcctccatgcaagtgtcctgctcctaacctgcttggaggcccctctgtgttcatcttcccacctaagatcaaggatgtgctgatgatctctctgagccccattgtgacctgtgtggtggtggatgtgtctgaggatgaccctgatgtgcagatctcttggtttgtgaacaatgtggaagtgcacacagcccagacacagacccacagagaggactacaacagcaccctgagagtggtgtctgccctgcctatccagcaccaggactggatgagtggcaaagagttcaagtgcaaagtgaacaacaaggacctgcctgctccaattgagagaaccatcagcaagcccaagggctctgttagagcccctcaagtgtatgtgctgcctccacctgaggaagagatgaccaagaaacaagtgaccctgacatgcatggtcacagacttcatgcctgaggacatctatgtggaatggaccaacaatggcaagacagagctgaactacaagaacactgagcctgtgctggactctgatggcagctacttcatgtacagcaagctgagggttgagaagaagaactgggttgagagaaacagctacagctgctctgtggtgcatgagggcctgcacaatcaccacaccaccaagagcttcagcagaacccctggcaag

SEQ ID NO: 338 - DNA, 1488 bp, Artificial Sequence
  synthetic construct; scFv construct
gagacaaccctgacacagagccctggcacattgtctctgagccctggggagagagtgaccctgtcttgtagagccagccagtctgtggacagaaactacctggcctggtatcagcagaagcctggccagtctcctagactgctgatctactctgcctctaggagagccacaggcatccctgacagattttctggcagtggctctggcacagacttcaccctgaccatcagcagactggaacctgaggactttgtggtgtactactgccagcagtatggtggcagccctcctatcacatttggccagggcacaagactggaaatcaagggtggaggcggttcaggcggaggtggcagcggcggtggagggtcaggtggaggtggatcacaggtccagctgcaagagtctggccctggactggtcaagccttctggcacactgagcctgacctgtgctgtgactggtggcagcatcagcagcagcaattggtggtcttgggtcagacagagccctggcaaaggcctggaatggattggagagatccaccatgatggcaacctgaactacaaccctctgctgaagtccagagtgtccatgagcctggacagaagcaagaaccagttcagcctgaagctgacctctgtgacagctgctgacactgctgtgtactactgtgccagatgggacttcttctttgactcctcctactacatcaggggctttgacctgtggggccagggcacaatggttacagtgtcctctggcggaggaggcggaggtggaggaggagagcctagaggccccaccatcaagccctgtcctccatgcaagtgtcctgctcctaacctgcttggaggcccctctgtgttcatcttcccacctaagatcaaggatgtgctgatgatctctctgagccccattgtgacctgtgtggtggtggatgtgtctgaggatgaccctgatgtgcagatctcttggtttgtgaacaatgtggaagtgcacacagcccagacacagacccacagagaggactacaacagcaccctgagagtggtgtctgccctgcctatccagcaccaggactggatgagtggcaaagagttcaagtgcaaagtgaacaacaaggacctgcctgctccaattgagagaaccatcagcaagcccaagggctctgttagagcccctcaagtgtatgtgctgcctccacctgaggaagagatgaccaagaaacaagtgaccctgacatgcatggtcacagacttcatgcctgaggacatctatgtggaatggaccaacaatggcaagacagagctgaactacaagaacactgagcctgtgctggactctgatggcagctacttcatgtacagcaagctgagggttgagaagaagaactgggttgagagaaacagctacagctgctctgtggtgcatgagggcctgcacaatcaccacaccaccaagagcttcagcagaacccctggcaag

SEQ ID NO: 339 - DNA, 1473 bp, Artificial Sequence
  synthetic construct; scFv construct
gagacaaccctgacacagagccctggcacattgtctctgagccctggggagagagtgaccctgtcttgtagagccagccagtctgtggacagaaactacctggcctggtatcagcagaagcctggccagtctcctagactgctgatctactctgcctctaggagagccacaggcatccctgacagattttctggcagtggctctggcacagacttcaccctgaccatcagcagactggaacctgaggactttgtggtgtactactgccagcagtatggtggcagccctcctatcacatttggccagggcacaagactggaaatcaagggtggaggcggttcaggcggaggtggcagcggcggtggagggtcgcaggtccagctgcaagagtctggccctggactggtcaagccttctggcacactgagcctgacctgtgctgtgactggtggcagcatcagcagcagcaattggtggtcttgggtcagacagagccctggcaaaggcctggaatggattggagagatccaccatgatggcaacctgaactacaaccctctgctgaagtccagagtgtccatgagcctggacagaagcaagaaccagttcagcctgaagctgacctctgtgacagctgctgacactgctgtgtactactgtgccagatgggacttcttctttgactcctcctactacatcaggggctttgacctgtggggccagggcacaatggttacagtgtcctctggcggaggaggcggaggtggaggaggagagcctagaggccccaccatcaagccctgtcctccatgcaagtgtcctgctcctaacctgcttggaggcccctctgtgttcatcttcccacctaagatcaaggatgtgctgatgatctctctgagccccattgtgacctgtgtggtggtggatgtgtctgaggatgaccctgatgtgcagatctcttggtttgtgaacaatgtggaagtgcacacagcccagacacagacccacagagaggactacaacagcaccctgagagtggtgtctgccctgcctatccagcaccaggactggatgagtggcaaagagttcaagtgcaaagtgaacaacaaggacctgcctgctccaattgagagaaccatcagcaagcccaagggctctgttagagcccctcaagtgtatgtgctgcctccacctgaggaagagatgaccaagaaacaagtgaccctgacatgcatggtcacagacttcatgcctgaggacatctatgtggaatggaccaacaatggcaagacagagctgaactacaagaacactgagcctgtgctggactctgatggcagctacttcatgtacagcaagctgagggttgagaagaagaactgggttgagagaaacagctacagctgctctgtggtgcatgagggcctgcacaatcaccacaccaccaagagcttcagcagaacccctggcaag

SEQ ID NO: 340 - DNA, 1457 bp, Artificial Sequence
  synthetic construct; scFv construct
agacaaccctgacacagagccctggcacattgtctctgagccctggggagagagtgaccctgtcttgtagagccagccagtctgtggacagaaactacctggcctggtatcagcagaagcctggccagtctcctagactgctgatctactctgcctctaggagagccacaggcatccctgacagattttctggcagtggctctggcacagacttcaccctgaccatcagcagactggaacctgaggactttgtggtgtactactgccagcagtatggtggcagccctcctatcacatttggccagggcacaagactggaaatcaagggcggaggtggcagcggaggtggcggatcacaggtccagctgcaagagtctggccctggactggtcaagccttctggcacactgagcctgacctgtgctgtgactggtggcagcatcagcagcagcaattggtggtcttgggtcagacagagccctggcaaaggcctggaatggattggagagatccaccatgatggcaacctgaactacaaccctctgctgaagtccagagtgtccatgagcctggacagaagcaagaaccagttcagcctgaagctgacctctgtgacagctgctgacactgctgtgtactactgtgccagatgggacttcttctttgactcctcctactacatcaggggctttgacctgtggggccagggcacaatggttacagtgtcctctggcggaggaggcggaggtggaggaggagagcctagaggccccaccatcaagccctgtcctccatgcaagtgtcctgctcctaacctgcttggaggcccctctgtgttcatcttcccacctaagatcaaggatgtgctgatgatctctctgagccccattgtgacctgtgtggtggtggatgtgtctgaggatgaccctgatgtgcagatctcttggtttgtgaacaatgtggaagtgcacacagcccagacacagacccacagagaggactacaacagcaccctgagagtggtgtctgccctgcctatccagcaccaggactggatgagtggcaaagagttcaagtgcaaagtgaacaacaaggacctgcctgctccaattgagagaaccatcagcaagcccaagggctctgttagagcccctcaagtgtatgtgctgcctccacctgaggaagagatgaccaagaaacaagtgaccctgacatgcatggtcacagacttcatgcctgaggacatctatgtggaatggaccaacaatggcaagacagagctgaactacaagaacactgagcctgtgctggactctgatggcagctacttcatgtacagcaagctgagggttgagaagaagaactgggttgagagaaacagctacagctgctctgtggtgcatgagggcctgcacaatcaccacaccaccaagagcttcagcagaacccctggcaag

SEQ ID NO: 341 - DNA, 6 bp, Artificial Sequence
  synthetic construct; kozak sequence
gccacc

SEQ ID NO: 342 - protein, 31 aa, Artificial Sequence; identical to SEQ ID NO: 134
  synthetic construct; AAV capsid protein

SEQ ID NO: 343 - DNA, 747 bp, Artificial Sequence
  Synthetic construct; promoter sequence
ttacccggggagcatgtcaaggtcaaaatcgtcaagagcgtcagcaggcagcatatcaaggtcaaagtcgtcaagggcatcggctgggagcatgtctaagtcaaaatcgtcaagggcgtcggtcggcccgccgctttcgcactttagctgtttctccaggccacatatgattagttccaggccgaaaaggaaggcaggttcggctccctgccggtcgaacagctcaattgcttgtttcagaagtgggggcatagaatcggtggtaggtgtctctctttcctcttttgctacttgatgctcctgttcctccaatacgcagcccagtgtaaagtggcccacggcggacagagcgtacagtgcgttctccagggagaagccttgctgacacaggaacgcgagctgattttccagggtttcgtactgtttctctgttgggcgggtgccgagatgcactttagccccgtcgcgatgtgagaggagagcacagcggtatgacttggcgttgttccgcagaaagtcttgccatgactcgccttccagggggcaggagtgggtatgatgcctgtccagcatctcgattggcagggcatcgagcagggcccgcttgttcttcacgtgccagtacagggtaggctgctcaactcccagcttttgagcgagtttccttgtcgtcaggccttcgataccgactccattgagtaattccagagcagagtttatgattttgctcttgtccagtctagacat

SEQ ID NO: 344 - DNA, 696 bp, Artificial Sequence
  synthetic construct; scFv construct
gaacccaagagctgtgacaagacccacacctgtcctccatgtcctgctccagaactgcttggaggcccttctgtgttcctgtttcctccaaagcctaaggacaccctgatgatcagcagaacccctgaagtgacctgtgtggtggttgatgtgtcccatgaggacccagaagtgaagttcaattggtatgtggatggggttgaagtgcacaatgccaagaccaagcctagagaggaacagtacaactccacctacagagtggtgtctgtgctgacagtgctgcaccaggactggctgaatggcaaagagtacaagtgcaaggtgtccaacaaggccctgcctgctcctattgagaaaaccatctccaaggccaagggccagccaagagaaccccaggtttacaccctgccacctagcagagaagagatgaccaagaaccaggtgtccctgacctgcctggttaagggcttctacccctctgacattgctgtggaatgggagagcaatggccagcctgaaaacaactacaagacaacccctcctgtgctggactcagatggctcattcttcctgtacagcaagctgactgtggacaagtccaggtggcagcagggaaatgtgttcagctgctctgtgatgcatgaggccctgcacaaccactacacccagaaaagtctgagtctgagccctggcaag

SEQ ID NO: 345 - DNA, 1458 bp, Artificial Sequence
  synthetic construct; scFv construct
gaggtgcagctggtgcagtctggggctgaagtgaagaagcctggggagagcctgaagatcagctgcaaagtgtctggctatgacttcagcaagtactggattggctgggtcagacagatgcctggcaaaggcctggaatggatgggactgatctaccctggggactctgacaccagatacagccctagcctggaaggccaggtgtccatctctgctgacaagagcatctctgcagcctacctgcagttcagcagcctgaaggcctctgactctgccatgtactactgtgtcagaaagggctactctgcctaccttggaggatggtttgatccttggggccagggcacactggtcacagtgtcctctggcggaggtggcagcggaggtggcggatcagacatccagctgacacagagccctgacagcctggctgcttctctgggagagagagtgaccatcaactgcagaagctcccagaacatcttctacaacagcaacaacaagaacttcctggcctggtatcagcagaaggctggccagtctcctaagctgctgatctactgggccagcaccagagaatctggggtgccagatagattttctggcagtggctctggcacagacttcaccctgacaatcagtggactgcaggctggggatgttgctgtgtacttctgccagcagtacttcacagatgcccctacctttggtggtggcaccaaggtggaaatcaagggcggaggaggcggaggtggaggaggagaacccaagagctgtgacaagacccacacctgtcctccatgtcctgctccagaactgcttggaggcccttctgtgttcctgtttcctccaaagcctaaggacaccctgatgatcagcagaacccctgaagtgacctgtgtggtggttgatgtgtcccatgaggacccagaagtgaagttcaattggtatgtggatggggttgaagtgcacaatgccaagaccaagcctagagaggaacagtacaactccacctacagagtggtgtctgtgctgacagtgctgcaccaggactggctgaatggcaaagagtacaagtgcaaggtgtccaacaaggccctgcctgctcctattgagaaaaccatctccaaggccaagggccagccaagagaaccccaggtttacaccctgccacctagcagagaagagatgaccaagaaccaggtgtccctgacctgcctggttaagggcttctacccctctgacattgctgtggaatgggagagcaatggccagcctgaaaacaactacaagacaacccctcctgtgctggactcagatggctcattcttcctgtacagcaagctgactgtggacaagtccaggtggcagcagggaaatgtgttcagctgctctgtgatgcatgaggccctgcacaaccactacacccagaaaagtctgagtctgagccctggcaag

SEQ ID NO: 346 - DNA, 1488 bp, Artificial Sequence
  synthetic construct; scFv construct
gaggtgcagctggtgcagtctggggctgaagtgaagaagcctggggagagcctgaagatcagctgcaaagtgtctggctatgacttcagcaagtactggattggctgggtcagacagatgcctggcaaaggcctggaatggatgggactgatctaccctggggactctgacaccagatacagccctagcctggaaggccaggtgtccatctctgctgacaagagcatctctgcagcctacctgcagttcagcagcctgaaggcctctgactctgccatgtactactgtgtcagaaagggctactctgcctaccttggaggatggtttgatccttggggccagggcacactggtcacagtgtcctctggtggaggcggttcaggcggaggtggcagcggcggtggagggtcaggtggaggtggatcagacatccagctgacacagagccctgacagcctggctgcttctctgggagagagagtgaccatcaactgcagaagctcccagaacatcttctacaacagcaacaacaagaacttcctggcctggtatcagcagaaggctggccagtctcctaagctgctgatctactgggccagcaccagagaatctggggtgccagatagattttctggcagtggctctggcacagacttcaccctgacaatcagtggactgcaggctggggatgttgctgtgtacttctgccagcagtacttcacagatgcccctacctttggtggtggcaccaaggtggaaatcaagggcggaggaggcggaggtggaggaggagaacccaagagctgtgacaagacccacacctgtcctccatgtcctgctccagaactgcttggaggcccttctgtgttcctgtttcctccaaagcctaaggacaccctgatgatcagcagaacccctgaagtgacctgtgtggtggttgatgtgtcccatgaggacccagaagtgaagttcaattggtatgtggatggggttgaagtgcacaatgccaagaccaagcctagagaggaacagtacaactccacctacagagtggtgtctgtgctgacagtgctgcaccaggactggctgaatggcaaagagtacaagtgcaaggtgtccaacaaggccctgcctgctcctattgagaaaaccatctccaaggccaagggccagccaagagaaccccaggtttacaccctgccacctagcagagaagagatgaccaagaaccaggtgtccctgacctgcctggttaagggcttctacccctctgacattgctgtggaatgggagagcaatggccagcctgaaaacaactacaagacaacccctcctgtgctggactcagatggctcattcttcctgtacagcaagctgactgtggacaagtccaggtggcagcagggaaatgtgttcagctgctctgtgatgcatgaggccctgcacaaccactacacccagaaaagtctgagtctgagccctggcaag

SEQ ID NO: 347 - DNA, 1461 bp, Artificial Sequence
  synthetic construct; scFv construct
gaggtgcagctgctgcagagtggtggtggtgttgtgcagcctggtggctctctgagactgtcttgtgaagcctctggcttcaccttcagcagctacagcatgcactgggtcagacaggcccctggcaaaggactggaatggctgaccctgatcagctacaatggggtcaacaagtactatgccaagtctgtgaagggcagatttgccatcagcagagatgacagcaagtctaccctgttcctgcagatgaacagcctgaccacagatgacactgctgtgtactactgtgccagatgtcccattcctagagctgccagctacagaaatggggacaactactttgagtttggccagggcaccctggtcacagtgtcctctggcggaggtggcagcggaggtggcggatcacaggctgtggtcacccaagagcctagcctgtctgtgtctcctggtggcacagtgacactgacatgtgccctgtcctctgcctctgtgtctaccagcagctaccccagctggtatcagcagacacctggccagcctccaagaatgctgatccacaacacagacaccagatcctctggggtgccagacagattctctggcagcatcctgggcaagaaggctgccctgacaatcactggtgcccaggctgatgatgagtctgactactactgtgtggtgtaccttggcaatggcttctgggtgtttggtggtggcaccaagctgacagtgctgggcggaggaggcggaggtggaggaggagaacccaagagctgtgacaagacccacacctgtcctccatgtcctgctccagaactgcttggaggcccttctgtgttcctgtttcctccaaagcctaaggacaccctgatgatcagcagaacccctgaagtgacctgtgtggtggttgatgtgtcccatgaggacccagaagtgaagttcaattggtatgtggatggggttgaagtgcacaatgccaagaccaagcctagagaggaacagtacaactccacctacagagtggtgtctgtgctgacagtgctgcaccaggactggctgaatggcaaagagtacaagtgcaaggtgtccaacaaggccctgcctgctcctattgagaaaaccatctccaaggccaagggccagccaagagaaccccaggtttacaccctgccacctagcagagaagagatgaccaagaaccaggtgtccctgacctgcctggttaagggcttctacccctctgacattgctgtggaatgggagagcaatggccagcctgaaaacaactacaagacaacccctcctgtgctggactcagatggctcattcttcctgtacagcaagctgactgtggacaagtccaggtggcagcagggaaatgtgttcagctgctctgtgatgcatgaggccctgcacaaccactacacccagaaaagtctgagtctgagccctggcaag

SEQ ID NO: 348 - DNA, 1491 bp, Artificial Sequence
  synthetic construct; scFv construct
gaggtgcagctgctgcagagtggtggtggtgttgtgcagcctggtggctctctgagactgtcttgtgaagcctctggcttcaccttcagcagctacagcatgcactgggtcagacaggcccctggcaaaggactggaatggctgaccctgatcagctacaatggggtcaacaagtactatgccaagtctgtgaagggcagatttgccatcagcagagatgacagcaagtctaccctgttcctgcagatgaacagcctgaccacagatgacactgctgtgtactactgtgccagatgtcccattcctagagctgccagctacagaaatggggacaactactttgagtttggccagggcaccctggtcacagtgtcctctggtggaggcggttcaggcggaggtggcagcggcggtggagggtcaggtggaggtggatcacaggctgtggtcacccaagagcctagcctgtctgtgtctcctggtggcacagtgacactgacatgtgccctgtcctctgcctctgtgtctaccagcagctaccccagctggtatcagcagacacctggccagcctccaagaatgctgatccacaacacagacaccagatcctctggggtgccagacagattctctggcagcatcctgggcaagaaggctgccctgacaatcactggtgcccaggctgatgatgagtctgactactactgtgtggtgtaccttggcaatggcttctgggtgtttggtggtggcaccaagctgacagtgctgggcggaggaggcggaggtggaggaggagaacccaagagctgtgacaagacccacacctgtcctccatgtcctgctccagaactgcttggaggcccttctgtgttcctgtttcctccaaagcctaaggacaccctgatgatcagcagaacccctgaagtgacctgtgtggtggttgatgtgtcccatgaggacccagaagtgaagttcaattggtatgtggatggggttgaagtgcacaatgccaagaccaagcctagagaggaacagtacaactccacctacagagtggtgtctgtgctgacagtgctgcaccaggactggctgaatggcaaagagtacaagtgcaaggtgtccaacaaggccctgcctgctcctattgagaaaaccatctccaaggccaagggccagccaagagaaccccaggtttacaccctgccacctagcagagaagagatgaccaagaaccaggtgtccctgacctgcctggttaagggcttctacccctctgacattgctgtggaatgggagagcaatggccagcctgaaaacaactacaagacaacccctcctgtgctggactcagatggctcattcttcctgtacagcaagctgactgtggacaagtccaggtggcagcagggaaatgtgttcagctgctctgtgatgcatgaggccctgcacaaccactacacccagaaaagtctgagtctgagccctggcaag

SEQ ID NO: 349 - DNA, 1428 bp, Artificial Sequence
  synthetic construct; scFv construct
gaggtgcagctggtggaaagtggtggtggactggttcagcctggtggcagcctgagactgtcttgtgctgcctctggcttcaccttcagcatctacaccatgagctgggtcagacaggctcctggcaaaggcctggaatgggtgtcagctatcctgtctgatggcagcacctactatgctgactctgtggaaggcagattcaccatcagcagagacaacagcaagaccacactgtacctgcagatgaacagcctgacagctgaggacactgctgtgtactactgcaccaagagagtggaaggctccttcagaggctggggacagggaacactggtcactgtgtcctctggcggaggtggcagcggaggtggcggatcagagattgtgatgacacagagccctggcacactgtctctgagccctggggaatctgccacactgagctgtagagccagccagtctgtgtctaccacctacctggcctggtatcagcagaagcctggacaggctcccagactgctgatctatggggcctcttctagagccacaggcatccctgacagattttctggcagtggctctggcacagacttcaccctgaccatcagcagactggaacctgaggactttgctgtgtactactgccagcagtatggtggcagcaggctgatcacatttggccagggcacaagactggaaatcaagggcggaggaggcggaggtggaggaggagaacccaagagctgtgacaagacccacacctgtcctccatgtcctgctccagaactgcttggaggcccttctgtgttcctgtttcctccaaagcctaaggacaccctgatgatcagcagaacccctgaagtgacctgtgtggtggttgatgtgtcccatgaggacccagaagtgaagttcaattggtatgtggatggggttgaagtgcacaatgccaagaccaagcctagagaggaacagtacaactccacctacagagtggtgtctgtgctgacagtgctgcaccaggactggctgaatggcaaagagtacaagtgcaaggtgtccaacaaggccctgcctgctcctattgagaaaaccatctccaaggccaagggccagccaagagaaccccaggtttacaccctgccacctagcagagaagagatgaccaagaaccaggtgtccctgacctgcctggttaagggcttctacccctctgacattgctgtggaatgggagagcaatggccagcctgaaaacaactacaagacaacccctcctgtgctggactcagatggctcattcttcctgtacagcaagctgactgtggacaagtccaggtggcagcagggaaatgtgttcagctgctctgtgatgcatgaggccctgcacaaccactacacccagaaaagtctgagtctgagccctggcaag

SEQ ID NO: 350 - DNA, 1458 bp, Artificial Sequence
  synthetic construct; scFv construct
gaggtgcagctggtggaaagtggtggtggactggttcagcctggtggcagcctgagactgtcttgtgctgcctctggcttcaccttcagcatctacaccatgagctgggtcagacaggctcctggcaaaggcctggaatgggtgtcagctatcctgtctgatggcagcacctactatgctgactctgtggaaggcagattcaccatcagcagagacaacagcaagaccacactgtacctgcagatgaacagcctgacagctgaggacactgctgtgtactactgcaccaagagagtggaaggctccttcagaggctggggacagggaacactggtcactgtgtcctctggtggaggcggttcaggcggaggtggcagcggcggtggagggtcaggtggaggtggatcagagattgtgatgacacagagccctggcacactgtctctgagccctggggaatctgccacactgagctgtagagccagccagtctgtgtctaccacctacctggcctggtatcagcagaagcctggacaggctcccagactgctgatctatggggcctcttctagagccacaggcatccctgacagattttctggcagtggctctggcacagacttcaccctgaccatcagcagactggaacctgaggactttgctgtgtactactgccagcagtatggtggcagcaggctgatcacatttggccagggcacaagactggaaatcaagggcggaggaggcggaggtggaggaggagaacccaagagctgtgacaagacccacacctgtcctccatgtcctgctccagaactgcttggaggcccttctgtgttcctgtttcctccaaagcctaaggacaccctgatgatcagcagaacccctgaagtgacctgtgtggtggttgatgtgtcccatgaggacccagaagtgaagttcaattggtatgtggatggggttgaagtgcacaatgccaagaccaagcctagagaggaacagtacaactccacctacagagtggtgtctgtgctgacagtgctgcaccaggactggctgaatggcaaagagtacaagtgcaaggtgtccaacaaggccctgcctgctcctattgagaaaaccatctccaaggccaagggccagccaagagaaccccaggtttacaccctgccacctagcagagaagagatgaccaagaaccaggtgtccctgacctgcctggttaagggcttctacccctctgacattgctgtggaatgggagagcaatggccagcctgaaaacaactacaagacaacccctcctgtgctggactcagatggctcattcttcctgtacagcaagctgactgtggacaagtccaggtggcagcagggaaatgtgttcagctgctctgtgatgcatgaggccctgcacaaccactacacccagaaaagtctgagtctgagccctggcaag

SEQ ID NO: 351 - protein, 220 aa, Artificial Sequence
  Synthetic construct; antibody chain
EVQLVQSGAEVKKPGESLKISCKVSGYDFSKYWIGWVRQMPGKGLEWMGLIYPGDSDTRYSPSLEGQVSISADKSISAAYLQFSSLKASDSAMYYCVRKGYSAYLGGWFDPWGQGTLVTVSSASTKGPSVFPLAPSSKSTSGGTAALGCLVKDYFPEPVTVSWNSGALTSGVHTFPAVLQSSGLYSLSSVVTVPSSSLGTQTYICNVNHKPSNTKVDKRV

SEQ ID NO: 352 - protein, 220 aa, Artificial Sequence
  Synthetic construct; antibody chain
EVQLVQSGAEVKKPGESLKISCKVSGYDFSKYWIGWVRQMPGKGLEWMGLIYPGDSDTRYSPSLEGQVSISADKSISAAYLQFSSLKASDSAMYYCVRKGYSAYLGGWFDPWGQGTLVTVSSASTKGPSVFPLAPCSRSTSESTAALGCLVKDYFPEPVTVSWNSGALTSGVHTFPAVLQSSGLYSLSSVVTVPSSNFGTQTYTCNVDHKPSNTKVDKTV

SEQ ID NO: 353 - protein, 220 aa, Artificial Sequence
  Synthetic construct; antibody chain
EVQLVQSGAEVKKPGESLKISCKVSGYDFSKYWIGWVRQMPGKGLEWMGLIYPGDSDTRYSPSLEGQVSISADKSISAAYLQFSSLKASDSAMYYCVRKGYSAYLGGWFDPWGQGTLVTVSSASTKGPSVFPLAPCSRSTSESTAALGCLVKDYFPEPVTVSWNSGALTSGVHTFPAVLQSSGLYSLSSVVTVPSSSLGTKTYTCNVDHKPSNTKVDKRV

SEQ ID NO: 354 - protein, 238 aa, Artificial Sequence
  Synthetic construct; antibody chain
  misc (229)..(234): can be present or absent from the peptide
  misc (235)..(238): can be present or absent from the peptide
EVQLVQSGAEVKKPGESLKISCKVSGYDFSKYWIGWVRQMPGKGLEWMGLIYPGDSDTRYSPSLEGQVSISADKSISAAYLQFSSLKASDSAMYYCVRKGYSAYLGGWFDPWGQGTLVTVSSASTKGPSVFPLAPCSRSTSESTAALGCLVKDYFPEPVTVSWNSGALTSGVHTFPAVLQSSGLYSLSSVVTVPSSNFGTQTYTCNVDHKPSNTKVDKTVERKSCVECPPCPAPPVAG

SEQ ID NO: 355 - protein, 244 aa, Artificial Sequence
  Synthetic construct; antibody chain
  misc (225)..(233): can be present or absent from peptide
  misc (230)..(230): Xaa can be proline or serine
  misc (234)..(244): can be present or absent from peptide
EVQLVQSGAEVKKPGESLKISCKVSGYDFSKYWIGWVRQMPGKGLEWMGLIYPGDSDTRYSPSLEGQVSISADKSISAAYLQFSSLKASDSAMYYCVRKGYSAYLGGWFDPWGQGTLVTVSSASTKGPSVFPLAPCSRSTSESTAALGCLVKDYFPEPVTVSWNSGALTSGVHTFPAVLQSSGLYSLSSVVTVPSSSLGTKTYTCNVDHKPSNTKVDKRVESKYGPPCPXCPAPEFLGGPSVFL

SEQ ID NO: 356 - protein, 224 aa, Artificial Sequence
  Synthetic construct; antibody chain
EVQLLQSGGGVVQPGGSLRLSCEASGFTFSSYSMHWVRQAPGKGLEWLTLISYNGVNKYYAKSVKGRFAISRDDSKSTLFLQMNSLTTDDTAVYYCARCPIPRAASYRNGDNYFEFGQGTLVTVSSASTKGPSVFPLAPSSKSTSGGTAALGCLVKDYFPEPVTVSWNSGALTSGVHTFPAVLQSSGLYSLSSVVTVPSSSLGTQTYICNVNHKPSNTKVDKRV

SEQ ID NO: 357 - protein, 224 aa, Artificial Sequence
  Synthetic construct; antibody chain
EVQLLQSGGGVVQPGGSLRLSCEASGFTFSSYSMHWVRQAPGKGLEWLTLISYNGVNKYYAKSVKGRFAISRDDSKSTLFLQMNSLTTDDTAVYYCARCPIPRAASYRNGDNYFEFGQGTLVTVSSASTKGPSVFPLAPCSRSTSESTAALGCLVKDYFPEPVTVSWNSGALTSGVHTFPAVLQSSGLYSLSSVVTVPSSNFGTQTYTCNVDHKPSNTKVDKTV

SEQ ID NO: 358 - protein, 224 aa, Artificial Sequence
  Synthetic construct; antibody chain
EVQLLQSGGGVVQPGGSLRLSCEASGFTFSSYSMHWVRQAPGKGLEWLTLISYNGVNKYYAKSVKGRFAISRDDSKSTLFLQMNSLTTDDTAVYYCARCPIPRAASYRNGDNYFEFGQGTLVTVSSASTKGPSVFPLAPCSRSTSESTAALGCLVKDYFPEPVTVSWNSGALTSGVHTFPAVLQSSGLYSLSSVVTVPSSSLGTKTYTCNVDHKPSNTKVDKRV

SEQ ID NO: 359 - protein, 242 aa, Artificial Sequence
  Synthetic construct; antibody chain
  misc (232)..(237): can be present or absent from peptide
  misc (238)..(242): can be present or absent from peptide
EVQLLQSGGGVVQPGGSLRLSCEASGFTFSSYSMHWVRQAPGKGLEWLTLISYNGVNKYYAKSVKGRFAISRDDSKSTLFLQMNSLTTDDTAVYYCARCPIPRAASYRNGDNYFEFGQGTLVTVSSASTKGPSVFPLAPCSRSTSESTAALGCLVKDYFPEPVTVSWNSGALTSGVHTFPAVLQSSGLYSLSSVVTVPSSNFGTQTYTCNVDHKPSNTKVDKTVERKSCVECPPCPAPPVAG

SEQ ID NO: 360 - protein, 248 aa, Artificial Sequence
  Synthetic construct; antibody chain
  misc (229)..(237): can be present or absent from peptide
  misc (234)..(234): Xaa can be proline or serine
  misc (238)..(248): can be present or absent from peptide
EVQLLQSGGGVVQPGGSLRLSCEASGFTFSSYSMHWVRQAPGKGLEWLTLISYNGVNKYYAKSVKGRFAISRDDSKSTLFLQMNSLTTDDTAVYYCARCPIPRAASYRNGDNYFEFGQGTLVTVSSASTKGPSVFPLAPCSRSTSESTAALGCLVKDYFPEPVTVSWNSGALTSGVHTFPAVLQSSGLYSLSSVVTVPSSSLGTKTYTCNVDHKPSNTKVDKRVESKYGPPCPXCPAPEFLGGPSVFL

SEQ ID NO: 361 - protein, 214 aa, Artificial Sequence
  Synthetic construct; antibody chain
EVQLVESGGGLVQPGGSLRLSCAASGFTFSIYTMSWVRQAPGKGLEWVSAILSDGSTYYADSVEGRFTISRDNSKTTLYLQMNSLTAEDTAVYYCTKRVEGSFRGWGQGTLVTVSSASTKGPSVFPLAPSSKSTSGGTAALGCLVKDYFPEPVTVSWNSGALTSGVHTFPAVLQSSGLYSLSSVVTVPSSSLGTQTYICNVNHKPSNTKVDKRV

SEQ ID NO: 362 - protein, 214 aa, Artificial Sequence
  Synthetic construct; antibody chain
EVQLVESGGGLVQPGGSLRLSCAASGFTFSIYTMSWVRQAPGKGLEWVSAILSDGSTYYADSVEGRFTISRDNSKTTLYLQMNSLTAEDTAVYYCTKRVEGSFRGWGQGTLVTVSSASTKGPSVFPLAPCSRSTSESTAALGCLVKDYFPEPVTVSWNSGALTSGVHTFPAVLQSSGLYSLSSVVTVPSSNFGTQTYTCNVDHKPSNTKVDKTV

SEQ ID NO: 363 - protein, 214 aa, Artificial Sequence
  Synthetic construct; antibody chain
EVQLVESGGGLVQPGGSLRLSCAASGFTFSIYTMSWVRQAPGKGLEWVSAILSDGSTYYADSVEGRFTISRDNSKTTLYLQMNSLTAEDTAVYYCTKRVEGSFRGWGQGTLVTVSSASTKGPSVFPLAPCSRSTSESTAALGCLVKDYFPEPVTVSWNSGALTSGVHTFPAVLQSSGLYSLSSVVTVPSSSLGTKTYTCNVDHKPSNTKVDKRV

SEQ ID NO: 364 - protein, 232 aa, Artificial Sequence
  Synthetic construct; antibody chain
  misc (222)..(227): can be present or absent from peptide
  misc (228)..(232): can be present or absent from peptide
EVQLVESGGGLVQPGGSLRLSCAASGFTFSIYTMSWVRQAPGKGLEWVSAILSDGSTYYADSVEGRFTISRDNSKTTLYLQMNSLTAEDTAVYYCTKRVEGSFRGWGQGTLVTVSSASTKGPSVFPLAPCSRSTSESTAALGCLVKDYFPEPVTVSWNSGALTSGVHTFPAVLQSSGLYSLSSVVTVPSSNFGTQTYTCNVDHKPSNTKVDKTVERKSCVECPPCPAPPVAG

SEQ ID NO: 365 - protein, 238 aa, Artificial Sequence
  Synthetic construct; antibody chain
  misc (219)..(227): can be present or absent from peptide
  misc (224)..(224): Xaa can be proline or serine
  misc (228)..(238): can be present or absent from peptide
EVQLVESGGGLVQPGGSLRLSCAASGFTFSIYTMSWVRQAPGKGLEWVSAILSDGSTYYADSVEGRFTISRDNSKTTLYLQMNSLTAEDTAVYYCTKRVEGSFRGWGQGTLVTVSSASTKGPSVFPLAPCSRSTSESTAALGCLVKDYFPEPVTVSWNSGALTSGVHTFPAVLQSSGLYSLSSVVTVPSSSLGTKTYTCNVDHKPSNTKVDKRVESKYGPPCPXCPAPEFLGGPSVFL

SEQ ID NO: 366 - protein, 218 aa, Artificial Sequence
  Synthetic construct; antibody chain
DIQLTQSPDSLAASLGERVTINCRSSQNIFYNSNNKNFLAWYQQKAGQSPKLLIYWASTRESGVPDRFSGSGSGTDFTLTISGLQAGDVAVYFCQQYFTDAPTFGGGTKVEIKGQPKAAPSVTLFPPSSEELQANKATLVCLISDFYPGAVTVAWKADSSPVKAGVETTTPSKQSNNKYAASSYLSLTPEQWKSHRSYSCQVTHEGSTVEKTVAPTCS

SEQ ID NO: 367 - protein, 217 aa, Artificial Sequence
  Synthetic construct; antibody chain
QAVVTQEPSLSVSPGGTVTLTCALSSASVSTSSYPSWYQQTPGQPPRMLIHNTDTRSSGVPDRFSGSILGKKAALTITGAQADDESDYYCVVYLGNGFWVFGGGTKLTVLRTVAAPSVFIFPPSDEQLKSGTASVVCLLNNFYPREAKVQWKVDNALQSGNSQESVTEQDSKDSTYSLSSTLTLSKADYEKHKVYACEVTHQGLSSPVTKSFNRGEC

SEQ ID NO: 368 - protein, 214 aa, Artificial Sequence
  Synthetic construct; antibody chain
EIVMTQSPGTLSLSPGESATLSCRASQSVSTTYLAWYQQKPGQAPRLLIYGASSRATGIPDRFSGSGSGTDFTLTISRLEPEDFAVYYCQQYGGSRLITFGQGTRLEIKGQPKAAPSVTLFPPSSEELQANKATLVCLISDFYPGAVTVAWKADSSPVKAGVETTTPSKQSNNKYAASSYLSLTPEQWKSHRSYSCQVTHEGSTVEKTVAPTCS

SEQ ID NO: 369 - DNA, 3859 bp, Artificial Sequence
  synthetic construct; scFv-Fc construct
ctgcgcgctcgctcgctcactgaggccgcccgggcaaagcccgggcgtcgggcgacctttggtcgcccggcctcagtgagcgagcgagcgcgcagagagggagtggccaactccatcactaggggttccttgtagttaatgattaacccgccatgctacttatctaccagggtaatggggatcctctagaactatagctagtcgacattgattattgactagttattaatagtaatcaattacggggtcattagttcatagcccatatatggagttccgcgttacataacttacggtaaatggcccgcctggctgaccgcccaacgacccccgcccattgacgtcaataatgacgtatgttcccatagtaacgccaatagggactttccattgacgtcaatgggtggagtatttacggtaaactgcccacttggcagtacatcaagtgtatcatatgccaagtacgccccctattgacgtcaatgacggtaaatggcccgcctggcattatgcccagtacatgaccttatgggactttcctacttggcagtacatctacgtattagtcatcgctattaccatggtcgaggtgagccccacgttctgcttcactctccccatctcccccccctccccacccccaattttgtatttatttattttttaattattttgtgcagcgatgggggcggggggggggggggggcgcgcgccaggcggggcggggcggggcgaggggcggggcggggcgaggcggagaggtgcggcggcagccaatcagagcggcgcgctccgaaagtttccttttatggcgaggcggcggcggcggcggccctataaaaagcgaagcgcgcggcgggcgggagtcgctgcgcgctgccttcgccccgtgccccgctccgccgccgcctcgcgccgcccgccccggctctgactgaccgcgttactcccacaggtgagcgggcgggacggcccttctcctccgggctgtaattagcgcttggtttaatgacggcttgtttcttttctgtggctgcgtgaaagccttgaggggctccgggagggccctttgtgcggggggagcggctcggggggtgcgtgcgtgtgtgtgtgcgtggggagcgccgcgtgcggctccgcgctgcccggcggctgtgagcgctgcgggcgcggcgcggggctttgtgcgctccgcagtgtgcgcgaggggagcgcggccgggggcggtgccccgcggtgcggggggggctgcgaggggaacaaaggctgcgtgcggggtgtgtgcgtgggggggtgagcagggggtgtgggcgcgtcggtcgggctgcaaccccccctgcacccccctccccgagttgctgagcacggcccggcttcgggtgcggggctccgtacggggcgtggcgcggggctcgccgtgccgggcggggggtggcggcaggtgggggtgccgggcggggcggggccgcctcgggccggggagggctcgggggaggggcgcggcggcccccggagcgccggcggctgtcgaggcgcggcgagccgcagccattgccttttatggtaatcgtgcgagagggcgcagggacttcctttgtcccaaatctgtgcggagccgaaatctgggaggcgccgccgcaccccctctagcgggcgcggggcgaagcggtgcggcgccggcaggaaggaaatgggcggggagggccttcgtgcgtcgccgcgccgccgtccccttctccctctccagcctcggggctgtccgcggggggacggctgccttcgggggggacggggcagggcggggttcggcttctggcgtgtgaccggcggctctagagcctctgctaaccatgttcatgccttcttctttttcctacagctcctgggcaacgtgctggttattgtgctgtctcatcattttggcaaagaattcgccaccatgtacagaatgcagctgctgctgctcattgccctgtctctggccctggtcaccaattctgaggtgcagctggtgcagtctggggctgaagtgaagaagcctggggagagcctgaagatcagctgcaaagtgtctggctatgacttcagcaagtactggattggctgggtcagacagatgcctggcaaaggcctggaatggatgggactgatctaccctggggactctgacaccagatacagccctagcctggaaggccaggtgtccatctctgctgacaagagcatctctgcagcctacctgcagttcagcagcctgaaggcctctgactctgccatgtactactgtgtcagaaagggctactctgcctaccttggaggatggtttgatccttggggccagggcacactggtcacagtgtcctctggtggaggcggttcaggcggaggtggcagcggcggtggagggtcggacatccagctgacacagagccctgacagcctggctgcttctctgggagagagagtgaccatcaactgcagaagctcccagaacatcttctacaacagcaacaacaagaacttcctggcctggtatcagcagaaggctggccagtctcctaagctgctgatctactgggccagcaccagagaatctggggtgccagatagattttctggcagtggctctggcacagacttcaccctgacaatcagtggactgcaggctggggatgttgctgtgtacttctgccagcagtacttcacagatgcccctacctttggtggtggcaccaaggtggaaatcaagggcggaggaggcggaggtggaggaggagagcctagaggccccaccatcaagccctgtcctccatgcaagtgtcctgctcctaacctgcttggaggcccctctgtgttcatcttcccacctaagatcaaggatgtgctgatgatctctctgagccccattgtgacctgtgtggtggtggatgtgtctgaggatgaccctgatgtgcagatctcttggtttgtgaacaatgtggaagtgcacacagcccagacacagacccacagagaggactacaacagcaccctgagagtggtgtctgccctgcctatccagcaccaggactggatgagtggcaaagagttcaagtgcaaagtgaacaacaaggacctgcctgctccaattgagagaaccatcagcaagcccaagggctctgttagagcccctcaagtgtatgtgctgcctccacctgaggaagagatgaccaagaaacaagtgaccctgacatgcatggtcacagacttcatgcctgaggacatctatgtggaatggaccaacaatggcaagacagagctgaactacaagaacactgagcctgtgctggactctgatggcagctacttcatgtacagcaagctgagggttgagaagaagaactgggttgagagaaacagctacagctgctctgtggtgcatgagggcctgcacaatcaccacaccaccaagagcttcagcagaacccctggcaagtaatgactcgaggacggggtgaactacgcctgaggatccgatctttttccctctgccaaaaattatggggacatcatgaagccccttgagcatctgacttctggctaataaaggaaatttattttcattgcaatagtgtgttggaattttttgtgtctctcactcggaagcaattcgttgatctgaatttcgaccacccataatacccattaccctggtagataagtagcatggcgggttaatcattaactacaaggaacccctagtgatggagttggccactccctctctgcgcgctcgctcgctcactgaggccgggcgaccaaaggtcgcccgacgcccgggctttgcccgggcggcctcagtgagcgagcgagcgcgcag

SEQ ID NO: 370 - DNA, 1536 bp, Artificial Sequence
  synthetic construct; scFv-Fc construct
atgtacagaatgcagctgctgctgctcattgccctgtctctggccctggtcaccaattctgaggtgcagctggtgcagtctggggctgaagtgaagaagcctggggagagcctgaagatcagctgcaaagtgtctggctatgacttcagcaagtactggattggctgggtcagacagatgcctggcaaaggcctggaatggatgggactgatctaccctggggactctgacaccagatacagccctagcctggaaggccaggtgtccatctctgctgacaagagcatctctgcagcctacctgcagttcagcagcctgaaggcctctgactctgccatgtactactgtgtcagaaagggctactctgcctaccttggaggatggtttgatccttggggccagggcacactggtcacagtgtcctctggtggaggcggttcaggcggaggtggcagcggcggtggagggtcggacatccagctgacacagagccctgacagcctggctgcttctctgggagagagagtgaccatcaactgcagaagctcccagaacatcttctacaacagcaacaacaagaacttcctggcctggtatcagcagaaggctggccagtctcctaagctgctgatctactgggccagcaccagagaatctggggtgccagatagattttctggcagtggctctggcacagacttcaccctgacaatcagtggactgcaggctggggatgttgctgtgtacttctgccagcagtacttcacagatgcccctacctttggtggtggcaccaaggtggaaatcaagggcggaggaggcggaggtggaggaggagagcctagaggccccaccatcaagccctgtcctccatgcaagtgtcctgctcctaacctgcttggaggcccctctgtgttcatcttcccacctaagatcaaggatgtgctgatgatctctctgagccccattgtgacctgtgtggtggtggatgtgtctgaggatgaccctgatgtgcagatctcttggtttgtgaacaatgtggaagtgcacacagcccagacacagacccacagagaggactacaacagcaccctgagagtggtgtctgccctgcctatccagcaccaggactggatgagtggcaaagagttcaagtgcaaagtgaacaacaaggacctgcctgctccaattgagagaaccatcagcaagcccaagggctctgttagagcccctcaagtgtatgtgctgcctccacctgaggaagagatgaccaagaaacaagtgaccctgacatgcatggtcacagacttcatgcctgaggacatctatgtggaatggaccaacaatggcaagacagagctgaactacaagaacactgagcctgtgctggactctgatggcagctacttcatgtacagcaagctgagggttgagaagaagaactgggttgagagaaacagctacagctgctctgtggtgcatgagggcctgcacaatcaccacaccaccaagagcttcagcagaacccctggcaag

SEQ ID NO: 371 - protein, 512 aa, Artificial Sequence
  synthetic construct; scFv-Fc polypeptide
MYRMQLLLLIALSLALVTNSEVQLVQSGAEVKKPGESLKISCKVSGYDFSKYWIGWVRQMPGKGLEWMGLIYPGDSDTRYSPSLEGQVSISADKSISAAYLQFSSLKASDSAMYYCVRKGYSAYLGGWFDPWGQGTLVTVSSGGGGSGGGGSGGGGSDIQLTQSPDSLAASLGERVTINCRSSQNIFYNSNNKNFLAWYQQKAGQSPKLLIYWASTRESGVPDRFSGSGSGTDFTLTISGLQAGDVAVYFCQQYFTDAPTFGGGTKVEIKGGGGGGGGGEPRGPTIKPCPPCKCPAPNLLGGPSVFIFPPKIKDVLMISLSPIVTCVVVDVSEDDPDVQISWFVNNVEVHTAQTQTHREDYNSTLRVVSALPIQHQDWMSGKEFKCKVNNKDLPAPIERTISKPKGSVRAPQVYVLPPPEEEMTKKQVTLTCMVTDFMPEDIYVEWTNNGKTELNYKNTEPVLDSDGSYFMYSKLRVEKKNWVERNSYSCSVVHEGLHNHHTTKSFSRTPGK

SEQ ID NO: 372 - DNA, 3862 bp, Artificial Sequence
  synthetic construct; scFv-Fc construct
ctgcgcgctcgctcgctcactgaggccgcccgggcaaagcccgggcgtcgggcgacctttggtcgcccggcctcagtgagcgagcgagcgcgcagagagggagtggccaactccatcactaggggttccttgtagttaatgattaacccgccatgctacttatctaccagggtaatggggatcctctagaactatagctagtcgacattgattattgactagttattaatagtaatcaattacggggtcattagttcatagcccatatatggagttccgcgttacataacttacggtaaatggcccgcctggctgaccgcccaacgacccccgcccattgacgtcaataatgacgtatgttcccatagtaacgccaatagggactttccattgacgtcaatgggtggagtatttacggtaaactgcccacttggcagtacatcaagtgtatcatatgccaagtacgccccctattgacgtcaatgacggtaaatggcccgcctggcattatgcccagtacatgaccttatgggactttcctacttggcagtacatctacgtattagtcatcgctattaccatggtcgaggtgagccccacgttctgcttcactctccccatctcccccccctccccacccccaattttgtatttatttattttttaattattttgtgcagcgatgggggcggggggggggggggggcgcgcgccaggcggggcggggcggggcgaggggcggggcggggcgaggcggagaggtgcggcggcagccaatcagagcggcgcgctccgaaagtttccttttatggcgaggcggcggcggcggcggccctataaaaagcgaagcgcgcggcgggcgggagtcgctgcgcgctgccttcgccccgtgccccgctccgccgccgcctcgcgccgcccgccccggctctgactgaccgcgttactcccacaggtgagcgggcgggacggcccttctcctccgggctgtaattagcgcttggtttaatgacggcttgtttcttttctgtggctgcgtgaaagccttgaggggctccgggagggccctttgtgcggggggagcggctcggggggtgcgtgcgtgtgtgtgtgcgtggggagcgccgcgtgcggctccgcgctgcccggcggctgtgagcgctgcgggcgcggcgcggggctttgtgcgctccgcagtgtgcgcgaggggagcgcggccgggggcggtgccccgcggtgcggggggggctgcgaggggaacaaaggctgcgtgcggggtgtgtgcgtgggggggtgagcagggggtgtgggcgcgtcggtcgggctgcaaccccccctgcacccccctccccgagttgctgagcacggcccggcttcgggtgcggggctccgtacggggcgtggcgcggggctcgccgtgccgggcggggggtggcggcaggtgggggtgccgggcggggcggggccgcctcgggccggggagggctcgggggaggggcgcggcggcccccggagcgccggcggctgtcgaggcgcggcgagccgcagccattgccttttatggtaatcgtgcgagagggcgcagggacttcctttgtcccaaatctgtgcggagccgaaatctgggaggcgccgccgcaccccctctagcgggcgcggggcgaagcggtgcggcgccggcaggaaggaaatgggcggggagggccttcgtgcgtcgccgcgccgccgtccccttctccctctccagcctcggggctgtccgcggggggacggctgccttcgggggggacggggcagggcggggttcggcttctggcgtgtgaccggcggctctagagcctctgctaaccatgttcatgccttcttctttttcctacagctcctgggcaacgtgctggttattgtgctgtctcatcattttggcaaagaattcgccaccatgtacagaatgcagctgctgctgctcattgccctgtctctggccctggtcaccaattctgaggtgcagctgctgcagagtggtggtggtgttgtgcagcctggtggctctctgagactgtcttgtgaagcctctggcttcaccttcagcagctacagcatgcactgggtcagacaggcccctggcaaaggactggaatggctgaccctgatcagctacaatggggtcaacaagtactatgccaagtctgtgaagggcagatttgccatcagcagagatgacagcaagtctaccctgttcctgcagatgaacagcctgaccacagatgacactgctgtgtactactgtgccagatgtcccattcctagagctgccagctacagaaatggggacaactactttgagtttggccagggcaccctggtcacagtgtcctctggtggaggcggttcaggcggaggtggcagcggcggtggagggtcgcaggctgtggtcacccaagagcctagcctgtctgtgtctcctggtggcacagtgacactgacatgtgccctgtcctctgcctctgtgtctaccagcagctaccccagctggtatcagcagacacctggccagcctccaagaatgctgatccacaacacagacaccagatcctctggggtgccagacagattctctggcagcatcctgggcaagaaggctgccctgacaatcactggtgcccaggctgatgatgagtctgactactactgtgtggtgtaccttggcaatggcttctgggtgtttggtggtggcaccaagctgacagtgctgggcggaggaggcggaggtggaggaggagagcctagaggccccaccatcaagccctgtcctccatgcaagtgtcctgctcctaacctgcttggaggcccctctgtgttcatcttcccacctaagatcaaggatgtgctgatgatctctctgagccccattgtgacctgtgtggtggtggatgtgtctgaggatgaccctgatgtgcagatctcttggtttgtgaacaatgtggaagtgcacacagcccagacacagacccacagagaggactacaacagcaccctgagagtggtgtctgccctgcctatccagcaccaggactggatgagtggcaaagagttcaagtgcaaagtgaacaacaaggacctgcctgctccaattgagagaaccatcagcaagcccaagggctctgttagagcccctcaagtgtatgtgctgcctccacctgaggaagagatgaccaagaaacaagtgaccctgacatgcatggtcacagacttcatgcctgaggacatctatgtggaatggaccaacaatggcaagacagagctgaactacaagaacactgagcctgtgctggactctgatggcagctacttcatgtacagcaagctgagggttgagaagaagaactgggttgagagaaacagctacagctgctctgtggtgcatgagggcctgcacaatcaccacaccaccaagagcttcagcagaacccctggcaagtaatgactcgaggacggggtgaactacgcctgaggatccgatctttttccctctgccaaaaattatggggacatcatgaagccccttgagcatctgacttctggctaataaaggaaatttattttcattgcaatagtgtgttggaattttttgtgtctctcactcggaagcaattcgttgatctgaatttcgaccacccataatacccattaccctggtagataagtagcatggcgggttaatcattaactacaaggaacccctagtgatggagttggccactccctctctgcgcgctcgctcgctcactgaggccgggcgaccaaaggtcgcccgacgcccgggctttgcccgggcggcctcagtgagcgagcgagcgcgcag

SEQ ID NO: 373 - DNA, 1539 bp, Artificial Sequence
  synthetic construct; scFv-Fc construct
atgtacagaatgcagctgctgctgctcattgccctgtctctggccctggtcaccaattctgaggtgcagctgctgcagagtggtggtggtgttgtgcagcctggtggctctctgagactgtcttgtgaagcctctggcttcaccttcagcagctacagcatgcactgggtcagacaggcccctggcaaaggactggaatggctgaccctgatcagctacaatggggtcaacaagtactatgccaagtctgtgaagggcagatttgccatcagcagagatgacagcaagtctaccctgttcctgcagatgaacagcctgaccacagatgacactgctgtgtactactgtgccagatgtcccattcctagagctgccagctacagaaatggggacaactactttgagtttggccagggcaccctggtcacagtgtcctctggtggaggcggttcaggcggaggtggcagcggcggtggagggtcgcaggctgtggtcacccaagagcctagcctgtctgtgtctcctggtggcacagtgacactgacatgtgccctgtcctctgcctctgtgtctaccagcagctaccccagctggtatcagcagacacctggccagcctccaagaatgctgatccacaacacagacaccagatcctctggggtgccagacagattctctggcagcatcctgggcaagaaggctgccctgacaatcactggtgcccaggctgatgatgagtctgactactactgtgtggtgtaccttggcaatggcttctgggtgtttggtggtggcaccaagctgacagtgctgggcggaggaggcggaggtggaggaggagagcctagaggccccaccatcaagccctgtcctccatgcaagtgtcctgctcctaacctgcttggaggcccctctgtgttcatcttcccacctaagatcaaggatgtgctgatgatctctctgagccccattgtgacctgtgtggtggtggatgtgtctgaggatgaccctgatgtgcagatctcttggtttgtgaacaatgtggaagtgcacacagcccagacacagacccacagagaggactacaacagcaccctgagagtggtgtctgccctgcctatccagcaccaggactggatgagtggcaaagagttcaagtgcaaagtgaacaacaaggacctgcctgctccaattgagagaaccatcagcaagcccaagggctctgttagagcccctcaagtgtatgtgctgcctccacctgaggaagagatgaccaagaaacaagtgaccctgacatgcatggtcacagacttcatgcctgaggacatctatgtggaatggaccaacaatggcaagacagagctgaactacaagaacactgagcctgtgctggactctgatggcagctacttcatgtacagcaagctgagggttgagaagaagaactgggttgagagaaacagctacagctgctctgtggtgcatgagggcctgcacaatcaccacaccaccaagagcttcagcagaacccctggcaag

SEQ ID NO: 374 - protein, 513 aa, Artificial Sequence
  synthetic construct; scFv-Fc polypeptide
MYRMQLLLLIALSLALVTNSEVQLLQSGGGVVQPGGSLRLSCEASGFTFSSYSMHWVRQAPGKGLEWLTLISYNGVNKYYAKSVKGRFAISRDDSKSTLFLQMNSLTTDDTAVYYCARCPIPRAASYRNGDNYFEFGQGTLVTVSSGGGGSGGGGSGGGGSQAVVTQEPSLSVSPGGTVTLTCALSSASVSTSSYPSWYQQTPGQPPRMLIHNTDTRSSGVPDRFSGSILGKKAALTITGAQADDESDYYCVVYLGNGFWVFGGGTKLTVLGGGGGGGGGEPRGPTIKPCPPCKCPAPNLLGGPSVFIFPPKIKDVLMISLSPIVTCVVVDVSEDDPDVQISWFVNNVEVHTAQTQTHREDYNSTLRVVSALPIQHQDWMSGKEFKCKVNNKDLPAPIERTISKPKGSVRAPQVYVLPPPEEEMTKKQVTLTCMVTDFMPEDIYVEWTNNGKTELNYKNTEPVLDSDGSYFMYSKLRVEKKNWVERNSYSCSVVHEGLHNHHTTKSFSRTPGK

SEQ ID NO: 375 - DNA, 3856 bp, Artificial Sequence
  synthetic construct; scFv-Fc construct
ctgcgcgctcgctcgctcactgaggccgcccgggcaaagcccgggcgtcgggcgacctttggtcgcccggcctcagtgagcgagcgagcgcgcagagagggagtggccaactccatcactaggggttccttgtagttaatgattaacccgccatgctacttatctaccagggtaatggggatcctctagaactatagctagtcgacattgattattgactagttattaatagtaatcaattacggggtcattagttcatagcccatatatggagttccgcgttacataacttacggtaaatggcccgcctggctgaccgcccaacgacccccgcccattgacgtcaataatgacgtatgttcccatagtaacgccaatagggactttccattgacgtcaatgggtggagtatttacggtaaactgcccacttggcagtacatcaagtgtatcatatgccaagtacgccccctattgacgtcaatgacggtaaatggcccgcctggcattatgcccagtacatgaccttatgggactttcctacttggcagtacatctacgtattagtcatcgctattaccatggtcgaggtgagccccacgttctgcttcactctccccatctcccccccctccccacccccaattttgtatttatttattttttaattattttgtgcagcgatgggggcggggggggggggggggcgcgcgccaggcggggcggggcggggcgaggggcggggcggggcgaggcggagaggtgcggcggcagccaatcagagcggcgcgctccgaaagtttccttttatggcgaggcggcggcggcggcggccctataaaaagcgaagcgcgcggcgggcgggagtcgctgcgcgctgccttcgccccgtgccccgctccgccgccgcctcgcgccgcccgccccggctctgactgaccgcgttactcccacaggtgagcgggcgggacggcccttctcctccgggctgtaattagcgcttggtttaatgacggcttgtttcttttctgtggctgcgtgaaagccttgaggggctccgggagggccctttgtgcggggggagcggctcggggggtgcgtgcgtgtgtgtgtgcgtggggagcgccgcgtgcggctccgcgctgcccggcggctgtgagcgctgcgggcgcggcgcggggctttgtgcgctccgcagtgtgcgcgaggggagcgcggccgggggcggtgccccgcggtgcggggggggctgcgaggggaacaaaggctgcgtgcggggtgtgtgcgtgggggggtgagcagggggtgtgggcgcgtcggtcgggctgcaaccccccctgcacccccctccccgagttgctgagcacggcccggcttcgggtgcggggctccgtacggggcgtggcgcggggctcgccgtgccgggcggggggtggcggcaggtgggggtgccgggcggggcggggccgcctcgggccggggagggctcgggggaggggcgcggcggcccccggagcgccggcggctgtcgaggcgcggcgagccgcagccattgccttttatggtaatcgtgcgagagggcgcagggacttcctttgtcccaaatctgtgcggagccgaaatctgggaggcgccgccgcaccccctctagcgggcgcggggcgaagcggtgcggcgccggcaggaaggaaatgggcggggagggccttcgtgcgtcgccgcgccgccgtccccttctccctctccagcctcggggctgtccgcggggggacggctgccttcgggggggacggggcagggcggggttcggcttctggcgtgtgaccggcggctctagagcctctgctaaccatgttcatgccttcttctttttcctacagctcctgggcaacgtgctggttattgtgctgtctcatcattttggcaaagaattcgccaccatgtacagaatgcagctgctgctgctcattgccctgtctctggccctggtcaccaattctcaggtccagctgcaagagtctggccctggactggtcaagccttctggcacactgagcctgacctgtgctgtgactggtggcagcatcagcagcagcaattggtggtcttgggtcagacagagccctggcaaaggcctggaatggattggagagatccaccatgatggcaacctgaactacaaccctctgctgaagtccagagtgtccatgagcctggacagaagcaagaaccagttcagcctgaagctgacctctgtgacagctgctgacactgctgtgtactactgtgccagatgggacttcttctttgactcctcctactacatcaggggctttgacctgtggggccagggcacaatggttacagtgtcctctggtggaggcggttcaggcggaggtggcagcggcggtggagggtcggagacaaccctgacacagagccctggcacattgtctctgagccctggggagagagtgaccctgtcttgtagagccagccagtctgtggacagaaactacctggcctggtatcagcagaagcctggccagtctcctagactgctgatctactctgcctctaggagagccacaggcatccctgacagattttctggcagtggctctggcacagacttcaccctgaccatcagcagactggaacctgaggactttgtggtgtactactgccagcagtatggtggcagccctcctatcacatttggccagggcacaagactggaaatcaagggcggaggaggcggaggtggaggaggagagcctagaggccccaccatcaagccctgtcctccatgcaagtgtcctgctcctaacctgcttggaggcccctctgtgttcatcttcccacctaagatcaaggatgtgctgatgatctctctgagccccattgtgacctgtgtggtggtggatgtgtctgaggatgaccctgatgtgcagatctcttggtttgtgaacaatgtggaagtgcacacagcccagacacagacccacagagaggactacaacagcaccctgagagtggtgtctgccctgcctatccagcaccaggactggatgagtggcaaagagttcaagtgcaaagtgaacaacaaggacctgcctgctccaattgagagaaccatcagcaagcccaagggctctgttagagcccctcaagtgtatgtgctgcctccacctgaggaagagatgaccaagaaacaagtgaccctgacatgcatggtcacagacttcatgcctgaggacatctatgtggaatggaccaacaatggcaagacagagctgaactacaagaacactgagcctgtgctggactctgatggcagctacttcatgtacagcaagctgagggttgagaagaagaactgggttgagagaaacagctacagctgctctgtggtgcatgagggcctgcacaatcaccacaccaccaagagcttcagcagaacccctggcaagtaatgactcgaggacggggtgaactacgcctgaggatccgatctttttccctctgccaaaaattatggggacatcatgaagccccttgagcatctgacttctggctaataaaggaaatttattttcattgcaatagtgtgttggaattttttgtgtctctcactcggaagcaattcgttgatctgaatttcgaccacccataatacccattaccctggtagataagtagcatggcgggttaatcattaactacaaggaacccctagtgatggagttggccactccctctctgcgcgctcgctcgctcactgaggccgggcgaccaaaggtcgcccgacgcccgggctttgcccgggcggcctcagtgagcgagcgagcgcgcag

SEQ ID NO: 376 - DNA, 1533 bp, Artificial Sequence
  synthetic construct; scFv-Fc construct
atgtacagaatgcagctgctgctgctcattgccctgtctctggccctggtcaccaattctcaggtccagctgcaagagtctggccctggactggtcaagccttctggcacactgagcctgacctgtgctgtgactggtggcagcatcagcagcagcaattggtggtcttgggtcagacagagccctggcaaaggcctggaatggattggagagatccaccatgatggcaacctgaactacaaccctctgctgaagtccagagtgtccatgagcctggacagaagcaagaaccagttcagcctgaagctgacctctgtgacagctgctgacactgctgtgtactactgtgccagatgggacttcttctttgactcctcctactacatcaggggctttgacctgtggggccagggcacaatggttacagtgtcctctggtggaggcggttcaggcggaggtggcagcggcggtggagggtcggagacaaccctgacacagagccctggcacattgtctctgagccctggggagagagtgaccctgtcttgtagagccagccagtctgtggacagaaactacctggcctggtatcagcagaagcctggccagtctcctagactgctgatctactctgcctctaggagagccacaggcatccctgacagattttctggcagtggctctggcacagacttcaccctgaccatcagcagactggaacctgaggactttgtggtgtactactgccagcagtatggtggcagccctcctatcacatttggccagggcacaagactggaaatcaagggcggaggaggcggaggtggaggaggagagcctagaggccccaccatcaagccctgtcctccatgcaagtgtcctgctcctaacctgcttggaggcccctctgtgttcatcttcccacctaagatcaaggatgtgctgatgatctctctgagccccattgtgacctgtgtggtggtggatgtgtctgaggatgaccctgatgtgcagatctcttggtttgtgaacaatgtggaagtgcacacagcccagacacagacccacagagaggactacaacagcaccctgagagtggtgtctgccctgcctatccagcaccaggactggatgagtggcaaagagttcaagtgcaaagtgaacaacaaggacctgcctgctccaattgagagaaccatcagcaagcccaagggctctgttagagcccctcaagtgtatgtgctgcctccacctgaggaagagatgaccaagaaacaagtgaccctgacatgcatggtcacagacttcatgcctgaggacatctatgtggaatggaccaacaatggcaagacagagctgaactacaagaacactgagcctgtgctggactctgatggcagctacttcatgtacagcaagctgagggttgagaagaagaactgggttgagagaaacagctacagctgctctgtggtgcatgagggcctgcacaatcaccacaccaccaagagcttcagcagaacccctggcaag

SEQ ID NO: 377 - protein, 511 aa, Artificial Sequence
  synthetic construct; scFv-Fc polypeptide
MYRMQLLLLIALSLALVTNSQVQLQESGPGLVKPSGTLSLTCAVTGGSISSSNWWSWVRQSPGKGLEWIGEIHHDGNLNYNPLLKSRVSMSLDRSKNQFSLKLTSVTAADTAVYYCARWDFFFDSSYYIRGFDLWGQGTMVTVSSGGGGSGGGGSGGGGSETTLTQSPGTLSLSPGERVTLSCRASQSVDRNYLAWYQQKPGQSPRLLIYSASRRATGIPDRFSGSGSGTDFTLTISRLEPEDFVVYYCQQYGGSPPITFGQGTRLEIKGGGGGGGGGEPRGPTIKPCPPCKCPAPNLLGGPSVFIFPPKIKDVLMISLSPIVTCVVVDVSEDDPDVQISWFVNNVEVHTAQTQTHREDYNSTLRVVSALPIQHQDWMSGKEFKCKVNNKDLPAPIERTISKPKGSVRAPQVYVLPPPEEEMTKKQVTLTCMVTDFMPEDIYVEWTNNGKTELNYKNTEPVLDSDGSYFMYSKLRVEKKNWVERNSYSCSVVHEGLHNHHTTKSFSRTPGK

SEQ ID NO: 378 - DNA, 3865 bp, Artificial Sequence
  synthetic construct; Fab construct
ctgcgcgctcgctcgctcactgaggccgcccgggcaaagcccgggcgtcgggcgacctttggtcgcccggcctcagtgagcgagcgagcgcgcagagagggagtggccaactccatcactaggggttccttgtagttaatgattaacccgccatgctacttatctaccagggtaatggggatcctctagaactatagctagtcgacattgattattgactagttattaatagtaatcaattacggggtcattagttcatagcccatatatggagttccgcgttacataacttacggtaaatggcccgcctggctgaccgcccaacgacccccgcccattgacgtcaataatgacgtatgttcccatagtaacgccaatagggactttccattgacgtcaatgggtggagtatttacggtaaactgcccacttggcagtacatcaagtgtatcatatgccaagtacgccccctattgacgtcaatgacggtaaatggcccgcctggcattatgcccagtacatgaccttatgggactttcctacttggcagtacatctacgtattagtcatcgctattaccatggtcgaggtgagccccacgttctgcttcactctccccatctcccccccctccccacccccaattttgtatttatttattttttaattattttgtgcagcgatgggggcggggggggggggggggcgcgcgccaggcggggcggggcggggcgaggggcggggcggggcgaggcggagaggtgcggcggcagccaatcagagcggcgcgctccgaaagtttccttttatggcgaggcggcggcggcggcggccctataaaaagcgaagcgcgcggcgggcgggagtcgctgcgcgctgccttcgccccgtgccccgctccgccgccgcctcgcgccgcccgccccggctctgactgaccgcgttactcccacaggtgagcgggcgggacggcccttctcctccgggctgtaattagcgcttggtttaatgacggcttgtttcttttctgtggctgcgtgaaagccttgaggggctccgggagggccctttgtgcggggggagcggctcggggggtgcgtgcgtgtgtgtgtgcgtggggagcgccgcgtgcggctccgcgctgcccggcggctgtgagcgctgcgggcgcggcgcggggctttgtgcgctccgcagtgtgcgcgaggggagcgcggccgggggcggtgccccgcggtgcggggggggctgcgaggggaacaaaggctgcgtgcggggtgtgtgcgtgggggggtgagcagggggtgtgggcgcgtcggtcgggctgcaaccccccctgcacccccctccccgagttgctgagcacggcccggcttcgggtgcggggctccgtacggggcgtggcgcggggctcgccgtgccgggcggggggtggcggcaggtgggggtgccgggcggggcggggccgcctcgggccggggagggctcgggggaggggcgcggcggcccccggagcgccggcggctgtcgaggcgcggcgagccgcagccattgccttttatggtaatcgtgcgagagggcgcagggacttcctttgtcccaaatctgtgcggagccgaaatctgggaggcgccgccgcaccccctctagcgggcgcggggcgaagcggtgcggcgccggcaggaaggaaatgggcggggagggccttcgtgcgtcgccgcgccgccgtccccttctccctctccagcctcggggctgtccgcggggggacggctgccttcgggggggacggggcagggcggggttcggcttctggcgtgtgaccggcggctctagagcctctgctaaccatgttcatgccttcttctttttcctacagctcctgggcaacgtgctggttattgtgctgtctcatcattttggcaaagaattcgccaccatgtacagaatgcagctgctgctgctcattgccctgtctctggccctggtcaccaattctgaagtgcagctggtgcagtctggggctgaagtgaagaagcctggggagagcctgaagatcagctgcaaagtgtctggctatgacttcagcaagtactggattggctgggtcagacagatgcctggcaaaggcctggaatggatgggcctgatctaccctggggactctgacaccagatacagccctagcctggaaggccaggtgtccatctctgctgacaagagcatctctgcagcctacctgcagttcagcagcctgaaggcctctgactctgccatgtactactgtgtcagaaagggctactctgcctaccttggaggatggtttgatccttggggccagggcacactggttacagtgtcctctgccagcacaaagggcccctctgtttttccactggctcccagcagcaagtccaccagtggtggtacagctgccctgggctgtctggtcaaggattacttccctgagcctgtgactgtgtcctggaactctggtgctctgacctctggggtgcacacctttccagctgtgctgcagtcctctggcctgtactctctgtcctctgtggtcacagtgcctagctctagcctgggcacccagacctacatctgcaatgtgaaccacaagcctagcaacaccaaggtggacaagagagtggaacccaagagctgtgacaagacccacagaaagagaagaggctctggagaaggcagaggctccctgctgacatgtggggatgttgaagagaatcctgggcctatgtataggatgcaactgctcctcctgattgctctgagcctggctcttgtgaccaactctgatatccagctgacacagagccctgacagcctggctgcttctctgggagagagagtgaccatcaactgcagaagctcccagaacatcttctacaactccaacaacaagaacttcctggcctggtatcagcaaaaggctggacagagccccaagctgctgatctactgggcctctaccagagagtctggggtcccagacagattctctggctctggatctggcacagacttcaccctgaccatcagtggactgcaggctggggatgttgctgtgtacttctgccagcagtacttcacagatgcccctacctttggtggtggcacaaaggtggaaatcaagagaacagtggctgccccatctgtgttcatcttcccaccatctgatgaacagctgaagtctggcactgcctctgttgtgtgcctgctgaacaacttctaccctagagaagccaaggtgcagtggaaagtggataatgccctccagtctggcaatagccaagagtcagtgacagagcaggactccaaggattccacctacagcctgagcagcaccctgacactgagcaaggctgactatgagaagcacaaagtgtatgcctgtgaagtgacacaccagggactgagcagcccagtgaccaagagcttcaacaggggagagtgctgataactcgaggacggggtgaactacgcctgaggatccgatctttttccctctgccaaaaattatggggacatcatgaagccccttgagcatctgacttctggctaataaaggaaatttattttcattgcaatagtgtgttggaattttttgtgtctctcactcggaagcaattcgttgatctgaatttcgaccacccataatacccattaccctggtagataagtagcatggcgggttaatcattaactacaaggaacccctagtgatggagttggccactccctctctgcgcgctcgctcgctcactgaggccgggcgaccaaaggtcgcccgacgcccgggctttgcccgggcggcctcagtgagcgagcgagcgcgcag

SEQ ID NO: 379 - DNA, 1545 bp, Artificial Sequence
  synthetic construct; Fab construct
atgtacagaatgcagctgctgctgctcattgccctgtctctggccctggtcaccaattctgaagtgcagctggtgcagtctggggctgaagtgaagaagcctggggagagcctgaagatcagctgcaaagtgtctggctatgacttcagcaagtactggattggctgggtcagacagatgcctggcaaaggcctggaatggatgggcctgatctaccctggggactctgacaccagatacagccctagcctggaaggccaggtgtccatctctgctgacaagagcatctctgcagcctacctgcagttcagcagcctgaaggcctctgactctgccatgtactactgtgtcagaaagggctactctgcctaccttggaggatggtttgatccttggggccagggcacactggttacagtgtcctctgccagcacaaagggcccctctgtttttccactggctcccagcagcaagtccaccagtggtggtacagctgccctgggctgtctggtcaaggattacttccctgagcctgtgactgtgtcctggaactctggtgctctgacctctggggtgcacacctttccagctgtgctgcagtcctctggcctgtactctctgtcctctgtggtcacagtgcctagctctagcctgggcacccagacctacatctgcaatgtgaaccacaagcctagcaacaccaaggtggacaagagagtggaacccaagagctgtgacaagacccacagaaagagaagaggctctggagaaggcagaggctccctgctgacatgtggggatgttgaagagaatcctgggcctatgtataggatgcaactgctcctcctgattgctctgagcctggctcttgtgaccaactctgatatccagctgacacagagccctgacagcctggctgcttctctgggagagagagtgaccatcaactgcagaagctcccagaacatcttctacaactccaacaacaagaacttcctggcctggtatcagcaaaaggctggacagagccccaagctgctgatctactgggcctctaccagagagtctggggtcccagacagattctctggctctggatctggcacagacttcaccctgaccatcagtggactgcaggctggggatgttgctgtgtacttctgccagcagtacttcacagatgcccctacctttggtggtggcacaaaggtggaaatcaagagaacagtggctgccccatctgtgttcatcttcccaccatctgatgaacagctgaagtctggcactgcctctgttgtgtgcctgctgaacaacttctaccctagagaagccaaggtgcagtggaaagtggataatgccctccagtctggcaatagccaagagtcagtgacagagcaggactccaaggattccacctacagcctgagcagcaccctgacactgagcaaggctgactatgagaagcacaaagtgtatgcctgtgaagtgacacaccagggactgagcagcccagtgaccaagagcttcaacaggggagagtgctga

SEQ ID NO: 380 - protein, 249 aa, Artificial Sequence
  synthetic construct; heavy chain with signal peptide
MYRMQLLLLIALSLALVTNSEVQLVQSGAEVKKPGESLKISCKVSGYDFSKYWIGWVRQMPGKGLEWMGLIYPGDSDTRYSPSLEGQVSISADKSISAAYLQFSSLKASDSAMYYCVRKGYSAYLGGWFDPWGQGTLVTVSSASTKGPSVFPLAPSSKSTSGGTAALGCLVKDYFPEPVTVSWNSGALTSGVHTFPAVLQSSGLYSLSSVVTVPSSSLGTQTYICNVNHKPSNTKVDKRVEPKSCDKTH

SEQ ID NO: 381 - protein, 229 aa, Artificial Sequence
  synthetic construct; heavy chain no signal peptide
EVQLVQSGAEVKKPGESLKISCKVSGYDFSKYWIGWVRQMPGKGLEWMGLIYPGDSDTRYSPSLEGQVSISADKSISAAYLQFSSLKASDSAMYYCVRKGYSAYLGGWFDPWGQGTLVTVSSASTKGPSVFPLAPSSKSTSGGTAALGCLVKDYFPEPVTVSWNSGALTSGVHTFPAVLQSSGLYSLSSVVTVPSSSLGTQTYICNVNHKPSNTKVDKRVEPKSCDKTH

SEQ ID NO: 382 - protein, 240 aa, Artificial Sequence
  synthetic construct; light chain with signal peptide
MYRMQLLLLIALSLALVTNSDIQLTQSPDSLAASLGERVTINCRSSQNIFYNSNNKNFLAWYQQKAGQSPKLLIYWASTRESGVPDRFSGSGSGTDFTLTISGLQAGDVAVYFCQQYFTDAPTFGGGTKVEIKRTVAAPSVFIFPPSDEQLKSGTASVVCLLNNFYPREAKVQWKVDNALQSGNSQESVTEQDSKDSTYSLSSTLTLSKADYEKHKVYACEVTHQGLSSPVTKSFNRGEC

SEQ ID NO: 383 - protein, 220 aa, Artificial Sequence; identical to SEQ ID NO: 188
  synthetic construct; light chain with no signal peptide

SEQ ID NO: 384 - DNA, 3835 bp, Artificial Sequence
  synthetic construct; Fab
ctgcgcgctcgctcgctcactgaggccgcccgggcaaagcccgggcgtcgggcgacctttggtcgcccggcctcagtgagcgagcgagcgcgcagagagggagtggccaactccatcactaggggttccttgtagttaatgattaacccgccatgctacttatctaccagggtaatggggatcctctagaactatagctagtcgacattgattattgactagttattaatagtaatcaattacggggtcattagttcatagcccatatatggagttccgcgttacataacttacggtaaatggcccgcctggctgaccgcccaacgacccccgcccattgacgtcaataatgacgtatgttcccatagtaacgccaatagggactttccattgacgtcaatgggtggagtatttacggtaaactgcccacttggcagtacatcaagtgtatcatatgccaagtacgccccctattgacgtcaatgacggtaaatggcccgcctggcattatgcccagtacatgaccttatgggactttcctacttggcagtacatctacgtattagtcatcgctattaccatggtcgaggtgagccccacgttctgcttcactctccccatctcccccccctccccacccccaattttgtatttatttattttttaattattttgtgcagcgatgggggcggggggggggggggggcgcgcgccaggcggggcggggcggggcgaggggcggggcggggcgaggcggagaggtgcggcggcagccaatcagagcggcgcgctccgaaagtttccttttatggcgaggcggcggcggcggcggccctataaaaagcgaagcgcgcggcgggcgggagtcgctgcgcgctgccttcgccccgtgccccgctccgccgccgcctcgcgccgcccgccccggctctgactgaccgcgttactcccacaggtgagcgggcgggacggcccttctcctccgggctgtaattagcgcttggtttaatgacggcttgtttcttttctgtggctgcgtgaaagccttgaggggctccgggagggccctttgtgcggggggagcggctcggggggtgcgtgcgtgtgtgtgtgcgtggggagcgccgcgtgcggctccgcgctgcccggcggctgtgagcgctgcgggcgcggcgcggggctttgtgcgctccgcagtgtgcgcgaggggagcgcggccgggggcggtgccccgcggtgcggggggggctgcgaggggaacaaaggctgcgtgcggggtgtgtgcgtgggggggtgagcagggggtgtgggcgcgtcggtcgggctgcaaccccccctgcacccccctccccgagttgctgagcacggcccggcttcgggtgcggggctccgtacggggcgtggcgcggggctcgccgtgccgggcggggggtggcggcaggtgggggtgccgggcggggcggggccgcctcgggccggggagggctcgggggaggggcgcggcggcccccggagcgccggcggctgtcgaggcgcggcgagccgcagccattgccttttatggtaatcgtgcgagagggcgcagggacttcctttgtcccaaatctgtgcggagccgaaatctgggaggcgccgccgcaccccctctagcgggcgcggggcgaagcggtgcggcgccggcaggaaggaaatgggcggggagggccttcgtgcgtcgccgcgccgccgtccccttctccctctccagcctcggggctgtccgcggggggacggctgccttcgggggggacggggcagggcggggttcggcttctggcgtgtgaccggcggctctagagcctctgctaaccatgttcatgccttcttctttttcctacagctcctgggcaacgtgctggttattgtgctgtctcatcattttggcaaagaattcgccaccatgtacagaatgcagctgctgctgctcattgccctgtctctggccctggtcaccaattctgaagtgcagctggtggaaagtggtggtggactggttcagcctggtggcagcctgagactgtcttgtgctgcctctggcttcaccttcagcatctacaccatgagctgggtcagacaggcccctggcaaaggactggaatgggtgtcagccatcctgtctgatggcagcacctactatgctgactctgtggaaggcagattcaccatcagcagagacaacagcaagaccacactgtacctgcagatgaacagcctgacagctgaggacacagcagtgtactactgcaccaagagagtggaaggctccttcagaggctggggccagggaacactggttacagtgtcctctgccagcacaaagggcccctctgtttttccactggctcccagcagcaagagcaccagtggtggaacagctgccctgggctgtctggtcaaggattacttccctgagcctgtgactgtgtcctggaactctggtgcactgacctctggggtgcacacctttccagctgtgctgcagtcctctggcctgtactctctgtcctctgtggtcacagtgcctagctctagcctgggcacccagacctacatctgcaatgtgaaccacaagcctagcaacaccaaggtggacaaaagagtggaacccaagagctgtgacaagacccacagaaagagaagaggctctggagaaggcagaggctccctgctgacatgtggggatgttgaagagaatcctgggcctatgtataggatgcaactgctcctcctgattgctctgagcctggctcttgtgaccaactctgagattgtgatgacacagagcccaggcacactgtcactgtctccaggggaatctgccactctgagctgtagagccagccagtctgtgtctaccacctacctggcctggtatcagcaaaagcctggacaggctcccagactgctgatctatggggcctcttctagagccacaggcatccctgacagattttctggcagtggctctggcacagacttcaccctgaccatctctagactggaacctgaggactttgctgtctactactgccagcagtatggtggctccagactgatcacctttggccagggcaccagactggaaatcaagagaacagtggctgccccatctgtgttcatcttcccaccatctgatgagcagctcaagtctggcactgcctctgttgtgtgcctgctgaacaacttctaccctagagaagccaaggtgcagtggaaggttgacaatgccctgcagtctggcaatagccaagaatctgtgacagagcaggactccaaggatagcacctacagcctgtctagcaccctgacactgagcaaggctgactatgagaagcacaaagtgtatgcctgtgaagtgacacaccagggcctgagcagcccagtgaccaagagcttcaatagaggggagtgctgataactcgaggacggggtgaactacgcctgaggatccgatctttttccctctgccaaaaattatggggacatcatgaagccccttgagcatctgacttctggctaataaaggaaatttattttcattgcaatagtgtgttggaattttttgtgtctctcactcggaagcaattcgttgatctgaatttcgaccacccataatacccattaccctggtagataagtagcatggcgggttaatcattaactacaaggaacccctagtgatggagttggccactccctctctgcgcgctcgctcgctcactgaggccgggcgaccaaaggtcgcccgacgcccgggctttgcccgggcggcctcagtgagcgagcgagcgcgcag

SEQ ID NO: 385 - DNA, 1512 bp, Artificial Sequence
  synthetic construct; Fab
atgtacagaatgcagctgctgctgctcattgccctgtctctggccctggtcaccaattctgaagtgcagctggtggaaagtggtggtggactggttcagcctggtggcagcctgagactgtcttgtgctgcctctggcttcaccttcagcatctacaccatgagctgggtcagacaggcccctggcaaaggactggaatgggtgtcagccatcctgtctgatggcagcacctactatgctgactctgtggaaggcagattcaccatcagcagagacaacagcaagaccacactgtacctgcagatgaacagcctgacagctgaggacacagcagtgtactactgcaccaagagagtggaaggctccttcagaggctggggccagggaacactggttacagtgtcctctgccagcacaaagggcccctctgtttttccactggctcccagcagcaagagcaccagtggtggaacagctgccctgggctgtctggtcaaggattacttccctgagcctgtgactgtgtcctggaactctggtgcactgacctctggggtgcacacctttccagctgtgctgcagtcctctggcctgtactctctgtcctctgtggtcacagtgcctagctctagcctgggcacccagacctacatctgcaatgtgaaccacaagcctagcaacaccaaggtggacaaaagagtggaacccaagagctgtgacaagacccacagaaagagaagaggctctggagaaggcagaggctccctgctgacatgtggggatgttgaagagaatcctgggcctatgtataggatgcaactgctcctcctgattgctctgagcctggctcttgtgaccaactctgagattgtgatgacacagagcccaggcacactgtcactgtctccaggggaatctgccactctgagctgtagagccagccagtctgtgtctaccacctacctggcctggtatcagcaaaagcctggacaggctcccagactgctgatctatggggcctcttctagagccacaggcatccctgacagattttctggcagtggctctggcacagacttcaccctgaccatctctagactggaacctgaggactttgctgtctactactgccagcagtatggtggctccagactgatcacctttggccagggcaccagactggaaatcaagagaacagtggctgccccatctgtgttcatcttcccaccatctgatgagcagctcaagtctggcactgcctctgttgtgtgcctgctgaacaacttctaccctagagaagccaaggtgcagtggaaggttgacaatgccctgcagtctggcaatagccaagaatctgtgacagagcaggactccaaggatagcacctacagcctgtctagcaccctgacactgagcaaggctgactatgagaagcacaaagtgtatgcctgtgaagtgacacaccagggcctgagcagcccagtgaccaagagcttcaatagaggggagtgc

SEQ ID NO: 386 - protein, 243 aa, Artificial Sequence
  synthetic construct; heavy chain with signal peptide
MYRMQLLLLIALSLALVTNSEVQLVESGGGLVQPGGSLRLSCAASGFTFSIYTMSWVRQAPGKGLEWVSAILSDGSTYYADSVEGRFTISRDNSKTTLYLQMNSLTAEDTAVYYCTKRVEGSFRGWGQGTLVTVSSASTKGPSVFPLAPSSKSTSGGTAALGCLVKDYFPEPVTVSWNSGALTSGVHTFPAVLQSSGLYSLSSVVTVPSSSLGTQTYICNVNHKPSNTKVDKRVEPKSCDKTH

SEQ ID NO: 387 - protein, 223 aa, Artificial Sequence
  synthetic construct; heavy chain no signal peptide
EVQLVESGGGLVQPGGSLRLSCAASGFTFSIYTMSWVRQAPGKGLEWVSAILSDGSTYYADSVEGRFTISRDNSKTTLYLQMNSLTAEDTAVYYCTKRVEGSFRGWGQGTLVTVSSASTKGPSVFPLAPSSKSTSGGTAALGCLVKDYFPEPVTVSWNSGALTSGVHTFPAVLQSSGLYSLSSVVTVPSSSLGTQTYICNVNHKPSNTKVDKRVEPKSCDKTH

SEQ ID NO: 388 - protein, 236 aa, Artificial Sequence
  synthetic construct; light chain with signal peptide
MYRMQLLLLIALSLALVTNSEIVMTQSPGTLSLSPGESATLSCRASQSVSTTYLAWYQQKPGQAPRLLIYGASSRATGIPDRFSGSGSGTDFTLTISRLEPEDFAVYYCQQYGGSRLITFGQGTRLEIKRTVAAPSVFIFPPSDEQLKSGTASVVCLLNNFYPREAKVQWKVDNALQSGNSQESVTEQDSKDSTYSLSSTLTLSKADYEKHKVYACEVTHQGLSSPVTKSFNRGEC

SEQ ID NO: 389 - protein, 216 aa, Artificial Sequence; identical to SEQ ID NO: 192
  synthetic construct; light chain with no signal peptide

SEQ ID NO: 390 - DNA, 3859 bp, Artificial Sequence
  synthetic construct; Fab
ctgcgcgctcgctcgctcactgaggccgcccgggcaaagcccgggcgtcgggcgacctttggtcgcccggcctcagtgagcgagcgagcgcgcagagagggagtggccaactccatcactaggggttccttgtagttaatgattaacccgccatgctacttatctaccagggtaatggggatcctctagaactatagctagtcgacattgattattgactagttattaatagtaatcaattacggggtcattagttcatagcccatatatggagttccgcgttacataacttacggtaaatggcccgcctggctgaccgcccaacgacccccgcccattgacgtcaataatgacgtatgttcccatagtaacgccaatagggactttccattgacgtcaatgggtggagtatttacggtaaactgcccacttggcagtacatcaagtgtatcatatgccaagtacgccccctattgacgtcaatgacggtaaatggcccgcctggcattatgcccagtacatgaccttatgggactttcctacttggcagtacatctacgtattagtcatcgctattaccatggtcgaggtgagccccacgttctgcttcactctccccatctcccccccctccccacccccaattttgtatttatttattttttaattattttgtgcagcgatgggggcggggggggggggggggcgcgcgccaggcggggcggggcggggcgaggggcggggcggggcgaggcggagaggtgcggcggcagccaatcagagcggcgcgctccgaaagtttccttttatggcgaggcggcggcggcggcggccctataaaaagcgaagcgcgcggcgggcgggagtcgctgcgcgctgccttcgccccgtgccccgctccgccgccgcctcgcgccgcccgccccggctctgactgaccgcgttactcccacaggtgagcgggcgggacggcccttctcctccgggctgtaattagcgcttggtttaatgacggcttgtttcttttctgtggctgcgtgaaagccttgaggggctccgggagggccctttgtgcggggggagcggctcggggggtgcgtgcgtgtgtgtgtgcgtggggagcgccgcgtgcggctccgcgctgcccggcggctgtgagcgctgcgggcgcggcgcggggctttgtgcgctccgcagtgtgcgcgaggggagcgcggccgggggcggtgccccgcggtgcggggggggctgcgaggggaacaaaggctgcgtgcggggtgtgtgcgtgggggggtgagcagggggtgtgggcgcgtcggtcgggctgcaaccccccctgcacccccctccccgagttgctgagcacggcccggcttcgggtgcggggctccgtacggggcgtggcgcggggctcgccgtgccgggcggggggtggcggcaggtgggggtgccgggcggggcggggccgcctcgggccggggagggctcgggggaggggcgcggcggcccccggagcgccggcggctgtcgaggcgcggcgagccgcagccattgccttttatggtaatcgtgcgagagggcgcagggacttcctttgtcccaaatctgtgcggagccgaaatctgggaggcgccgccgcaccccctctagcgggcgcggggcgaagcggtgcggcgccggcaggaaggaaatgggcggggagggccttcgtgcgtcgccgcgccgccgtccccttctccctctccagcctcggggctgtccgcggggggacggctgccttcgggggggacggggcagggcggggttcggcttctggcgtgtgaccggcggctctagagcctctgctaaccatgttcatgccttcttctttttcctacagctcctgggcaacgtgctggttattgtgctgtctcatcattttggcaaagaattcatgtacaggatgcagctgctgctgctcattgccctgtctctggccctggtcaccaattctgaagtgcagcttctgcagtctggtggtggtgttgtgcagcctggtggctctctgagactgtcttgtgaagcctctggcttcaccttcagcagctacagcatgcactgggttagacaggcccctggcaaaggcctggaatggctgaccctgatcagctacaatggggtcaacaagtactatgccaagtctgtgaagggcagatttgccatcagcagagatgacagcaagagcaccctgtttctgcagatgaacagcctgaccacagatgacacagcagtgtactactgtgccagatgtcccattcctagagctgccagctacagaaatggggacaactactttgagtttggccagggcacactggtcacagtgtcctctgcctctacaaagggcccctctgtgtttcctctggctcctagcagcaagtccaccagtggtggtacagctgccctgggctgtctggtcaaggattacttccctgagcctgtgactgtgtcctggaattctggggctctgacctctggggtgcacacctttccagctgtgctgcagtcctctggcctgtactctctgtcctctgtggttacagtgccaagcagctctctgggcacccagacctacatctgcaatgtgaaccacaagcctagcaacaccaaggtggacaagagagtggaacccaagagctgtgacaagacccacagaaagagaagaggctctggagaaggcagaggcagcctgctgacatgtggggatgttgaagagaatcctgggcctatgtatagaatgcaactgctcctcctgattgctctgagcctggctctggttaccaacagccaggctgtggtcacacaagagcccagcctgtctgtgtctcctggtggaacagtgaccctgacttgtgccctctcttctgcctctgtgtccacaagcagctaccccagctggtatcagcagacacctggccagccacctagaatgctgatccacaacactgacaccagaagctctggggtcccagacagattctctggcagcatcctgggaaagaaggctgccctgacaatcactggtgcccaggctgatgatgagtctgactactattgtgtggtgtaccttggcaatggcttttgggtgttcggtggtggcaccaaactgactgtgctgggacagcctaaagctgccccttctgtgacactgttcccacctagctctgaggaactgcaggccaacaaagccacacttgtgtgcctgatctctgacttctaccctggggctgtgacagtggcttggaaggctgatagcagccctgtgaaggctggggttgagacaaccacacctagcaagcagagcaacaacaaatatgctgcctccagctatctgtctctgacccctgagcagtggaagtcccacagatcctacagctgtcaagtgacccatgagggctccacagtggaaaagacagtggccccaacagagtgcagctgatgactcgaggacggggtgaactacgcctgaggatccgatctttttccctctgccaaaaattatggggacatcatgaagccccttgagcatctgacttctggctaataaaggaaatttattttcattgcaatagtgtgttggaattttttgtgtctctcactcggaagcaattcgttgatctgaatttcgaccacccataatacccattaccctggtagataagtagcatggcgggttaatcattaactacaaggaacccctagtgatggagttggccactccctctctgcgcgctcgctcgctcactgaggccgggcgaccaaaggtcgcccgacgcccgggctttgcccgggcggcctcagtgagcgagcgagcgcgcag

SEQ ID NO: 391 - protein, 1542 aa, Artificial Sequence
  synthetic construct; Fab
ATGTACAGGATGCAGCTGCTGCTGCTCATTGCCCTGTCTCTGGCCCTGGTCACCAATTCTGAAGTGCAGCTTCTGCAGTCTGGTGGTGGTGTTGTGCAGCCTGGTGGCTCTCTGAGACTGTCTTGTGAAGCCTCTGGCTTCACCTTCAGCAGCTACAGCATGCACTGGGTTAGACAGGCCCCTGGCAAAGGCCTGGAATGGCTGACCCTGATCAGCTACAATGGGGTCAACAAGTACTATGCCAAGTCTGTGAAGGGCAGATTTGCCATCAGCAGAGATGACAGCAAGAGCACCCTGTTTCTGCAGATGAACAGCCTGACCACAGATGACACAGCAGTGTACTACTGTGCCAGATGTCCCATTCCTAGAGCTGCCAGCTACAGAAATGGGGACAACTACTTTGAGTTTGGCCAGGGCACACTGGTCACAGTGTCCTCTGCCTCTACAAAGGGCCCCTCTGTGTTTCCTCTGGCTCCTAGCAGCAAGTCCACCAGTGGTGGTACAGCTGCCCTGGGCTGTCTGGTCAAGGATTACTTCCCTGAGCCTGTGACTGTGTCCTGGAATTCTGGGGCTCTGACCTCTGGGGTGCACACCTTTCCAGCTGTGCTGCAGTCCTCTGGCCTGTACTCTCTGTCCTCTGTGGTTACAGTGCCAAGCAGCTCTCTGGGCACCCAGACCTACATCTGCAATGTGAACCACAAGCCTAGCAACACCAAGGTGGACAAGAGAGTGGAACCCAAGAGCTGTGACAAGACCCACAGAAAGAGAAGAGGCTCTGGAGAAGGCAGAGGCAGCCTGCTGACATGTGGGGATGTTGAAGAGAATCCTGGGCCTATGTATAGAATGCAACTGCTCCTCCTGATTGCTCTGAGCCTGGCTCTGGTTACCAACAGCCAGGCTGTGGTCACACAAGAGCCCAGCCTGTCTGTGTCTCCTGGTGGAACAGTGACCCTGACTTGTGCCCTCTCTTCTGCCTCTGTGTCCACAAGCAGCTACCCCAGCTGGTATCAGCAGACACCTGGCCAGCCACCTAGAATGCTGATCCACAACACTGACACCAGAAGCTCTGGGGTCCCAGACAGATTCTCTGGCAGCATCCTGGGAAAGAAGGCTGCCCTGACAATCACTGGTGCCCAGGCTGATGATGAGTCTGACTACTATTGTGTGGTGTACCTTGGCAATGGCTTTTGGGTGTTCGGTGGTGGCACCAAACTGACTGTGCTGGGACAGCCTAAAGCTGCCCCTTCTGTGACACTGTTCCCACCTAGCTCTGAGGAACTGCAGGCCAACAAAGCCACACTTGTGTGCCTGATCTCTGACTTCTACCCTGGGGCTGTGACAGTGGCTTGGAAGGCTGATAGCAGCCCTGTGAAGGCTGGGGTTGAGACAACCACACCTAGCAAGCAGAGCAACAACAAATATGCTGCCTCCAGCTATCTGTCTCTGACCCCTGAGCAGTGGAAGTCCCACAGATCCTACAGCTGTCAAGTGACCCATGAGGGCTCCACAGTGGAAAAGACAGTGGCCCCAACAGAGTGCAGC

SEQ ID NO: 392 - protein, 253 aa, Artificial Sequence
  synthetic construct; heavy chain with signal peptide
MYRMQLLLLIALSLALVTNSEVQLLQSGGGVVQPGGSLRLSCEASGFTFSSYSMHWVRQAPGKGLEWLTLISYNGVNKYYAKSVKGRFAISRDDSKSTLFLQMNSLTTDDTAVYYCARCPIPRAASYRNGDNYFEFGQGTLVTVSSASTKGPSVFPLAPSSKSTSGGTAALGCLVKDYFPEPVTVSWNSGALTSGVHTFPAVLQSSGLYSLSSVVTVPSSSLGTQTYICNVNHKPSNTKVDKRVEPKSCDKTH

SEQ ID NO: 393 - protein, 233 aa, Artificial Sequence
  synthetic construct; heavy chain with no signal peptide
EVQLLQSGGGVVQPGGSLRLSCEASGFTFSSYSMHWVRQAPGKGLEWLTLISYNGVNKYYAKSVKGRFAISRDDSKSTLFLQMNSLTTDDTAVYYCARCPIPRAASYRNGDNYFEFGQGTLVTVSSASTKGPSVFPLAPSSKSTSGGTAALGCLVKDYFPEPVTVSWNSGALTSGVHTFPAVLQSSGLYSLSSVVTVPSSSLGTQTYICNVNHKPSNTKVDKRVEPKSCDKTH

SEQ ID NO: 394 - protein, 236 aa, Artificial Sequence
  synthetic construct; light chain with signal peptide
MYRMQLLLLIALSLALVTNSQAVVTQEPSLSVSPGGTVTLTCALSSASVSTSSYPSWYQQTPGQPPRMLIHNTDTRSSGVPDRFSGSILGKKAALTITGAQADDESDYYCVVYLGNGFWVFGGGTKLTVLGQPKAAPSVTLFPPSSEELQANKATLVCLISDFYPGAVTVAWKADSSPVKAGVETTTPSKQSNNKYAASSYLSLTPEQWKSHRSYSCQVTHEGSTVEKTVAPTECS

SEQ ID NO: 395 - protein, 216 aa, Artificial Sequence
  synthetic construct; light chain with no signal peptide
QAVVTQEPSLSVSPGGTVTLTCALSSASVSTSSYPSWYQQTPGQPPRMLIHNTDTRSSGVPDRFSGSILGKKAALTITGAQADDESDYYCVVYLGNGFWVFGGGTKLTVLGQPKAAPSVTLFPPSSEELQANKATLVCLISDFYPGAVTVAWKADSSPVKAGVETTTPSKQSNNKYAASSYLSLTPEQWKSHRSYSCQVTHEGSTVEKTVAPTECS

SEQ ID NO: 396 - DNA, 720 bp, Artificial Sequence
  synthetic construct; eGFP coding sequence
atggtgagcaagggcgaggagctgttcaccggggtggtgcccatcctggtcgagctggacggcgacgtaaacggccacaagttcagcgtgtccggcgagggcgagggcgatgccacctacggcaagctgaccctgaagttcatctgcaccaccggcaagctgcccgtgccctggcccaccctcgtgaccaccctgacctacggcgtgcagtgcttcagccgctaccccgaccacatgaagcagcacgacttcttcaagtccgccatgcccgaaggctacgtccaggagcgcaccatcttcttcaaggacgacggcaactacaagacccgcgccgaggtgaagttcgagggcgacaccctggtgaaccgcatcgagctgaagggcatcgacttcaaggaggacggcaacatcctggggcacaagctggagtacaactacaacagccacaacgtctatatcatggccgacaagcagaagaacggcatcaaggtgaacttcaagatccgccacaacatcgaggacggcagcgtgcagctcgccgaccactaccagcagaacacccccatcggcgacggccccgtgctgctgcccgacaaccactacctgagcacccagtccgccctgagcaaagaccccaacgagaagcgcgatcacatggtcctgctggagttcgtgaccgccgccgggatcactctcggcatggacgagctgtacaagtaa

SEQ ID NO: 397 - protein, 239 aa, Artificial Sequence
  synthetic construct; eGFP protein
MVSKGEELFTGVVPILVELDGDVNGHKFSVSGEGEGDATYGKLTLKFICTTGKLPVPWPTLVTTLTYGVQCFSRYPDHMKQHDFFKSAMPEGYVQERTIFFKDDGNYKTRAEVKFEGDTLVNRIELKGIDFKEDGNILGHKLEYNYNSHNVYIMADKQKNGIKVNFKIRHNIEDGSVQLADHYQQNTPIGDGPVLLPDNHYLSTQSALSKDPNEKRDHMVLLEFVTAAGITLGMDELYK

1. A recombinant AAV genome comprising a nucleic acid expression cassette, wherein the expression cassette comprises a nucleotide sequence encoding a variable heavy chain (VH) chain and a variable light (VL) chain domain of an anti-Tau monoclonal antibody (mAb) or antigen binding fragment thereof, wherein the mAb or the antigen-binding fragment thereof,
(i) binds pathological hyperphosphorylated Tau filaments in dystrophic neurites, neurofibrillary tangles and neuropil threads in an immunohistochemical (HC) assay with brain tissue of patients with Alzheimer's Disease (AD), Progressive supranuclear palsy (PSP) and/or Pick's Disease (PiD); and/or
(ii) captures Tau and AD-associated Tau in an immunoprecipitation (IP) assay with brain extracts of patients with AD; and/or
(iii) recognizes an epitope comprising the amino acid sequence 217-TPPTREPKKVA-227 (SEQ ID NO: 120) and 249-PMPDLKN-255 (SEQ ID NO: 121) or the phosphorylated Tau peptide pS202/pT205 having the amino acid sequence SGYSSPG(pS)PG(pT)PGSRSRT (SEQ ID NO: 122) or the phosphorylated Tau peptide pT212/pS214 having the amino acid sequence GTPGSRSR(pT)P(pS)LPTPPTR (SEQ ID NO: 123);
wherein (1) AAV inverted terminal repeats flank the expression cassette; and (2) the expression cassette comprises one or more regulatory elements operably linked to the nucleotide sequence encoding the mAb or antigen binding fragment thereof and wherein the one or more regulatory elements control expression of the mAb or antigen binding fragment thereof in human CNS tissue or liver cells.

2. The recombinant AAV genome of claim 1, wherein the variable heavy (VH) chain domain comprises VH complementary determining regions (CDRs) 1, 2, and 3, and the variable light (VL) chain domain comprises VL CDRs 1, 2, and 3, wherein
(a) VH-CDR1 comprises the amino acid sequence of SEQ ID NO: 154 or a variant thereof, wherein the variant comprises one or two amino acid substitutions,
(b) VH-CDR2 comprises the amino acid sequence of SEQ ID NO: 155 or a variant thereof, wherein the variant comprises one or two amino acid substitutions,
(c) VH-CDR3 comprises the amino acid sequence of SEQ ID NO: 156 or a variant thereof, wherein the variant comprises one or two amino acid substitutions,
(d) VL-CDR1 comprises the amino acid sequence of SEQ ID NO: 157 or a variant thereof, wherein the variant comprises one or two amino acid substitutions,
(e) VL-CDR2 comprises the amino acid sequence of SEQ ID NO: 158 or a variant thereof, wherein the variant comprises one or two amino acid substitutions, and
(f) VL-CDR3 comprises the amino acid sequence of SEQ ID NO: 159 or a variant thereof, wherein the variant comprises one or two amino acid substitutions;
or wherein
(g) VH-CDR1 comprises the amino acid sequence of SEQ ID NO: 160 or a variant thereof, wherein the variant comprises one or two amino acid substitutions,
(h) VH-CDR2 comprises the amino acid sequence of SEQ ID NO: 161 or a variant thereof, wherein the variant comprises one or two amino acid substitutions,
(i) VH-CDR3 comprises the amino acid sequence of SEQ ID NO: 162 or a variant thereof, wherein the variant comprises one or two amino acid substitutions,
(j) VL-CDR1 comprises the amino acid sequence of SEQ ID NO: 163 or a variant thereof, wherein the variant comprises one or two amino acid substitutions,
(k) VL-CDR2 comprises the amino acid sequence of SEQ ID NO: 164 or a variant thereof, wherein the variant comprises one or two amino acid substitutions, and
(l) VL-CDR3 comprises the amino acid sequence of SEQ ID NO: 165 or a variant thereof, wherein the variant comprises one or two amino acid substitutions;
or wherein
(m) VH-CDR1 comprises the amino acid sequence of SEQ ID NO: 166 or a variant thereof, wherein the variant comprises one or two amino acid substitutions,
(n) VH-CDR2 comprises the amino acid sequence of SEQ ID NO: 167 or a variant thereof, wherein the variant comprises one or two amino acid substitutions,
(o) VH-CDR3 comprises the amino acid sequence of SEQ ID NO: 168 or a variant thereof, wherein the variant comprises one or two amino acid substitutions,
(p) VL-CDR1 comprises the amino acid sequence of SEQ ID NO: 169 or a variant thereof, wherein the variant comprises one or two amino acid substitutions,
(q) VL-CDR2 comprises the amino acid sequence of SEQ ID NO: 170 or a variant thereof, wherein the variant comprises one or two amino acid substitutions, and
(r) VL-CDR3 comprises the amino acid sequence of SEQ ID NO: 171 or a variant thereof, wherein the variant comprises one or two amino acid substitutions.

3. The recombinant AAV genome of claim 2, wherein the VH domain comprises an amino acid sequence of SEQ ID NO: 97 or a variant thereof having at least 90% sequence identity to the amino acid sequence of SEQ ID NO: 97 and the VL domain comprises an amino acid sequence of SEQ ID NO: 98 or a variant thereof having at least 90% sequence identity to the amino acid sequence of SEQ ID NO: 98; or the VH domain comprises an amino acid sequence of SEQ ID NO: 99 or a variant thereof having at least 90% sequence identity to the amino acid sequence of SEQ ID NO: 99 and the VL domain comprises an amino acid sequence of SEQ ID NO: 100 or a variant thereof having at least 90% sequence identity to the amino acid sequence of SEQ ID NO: 100; or the VH domain comprises an amino acid sequence of SEQ ID NO: 101 or a variant thereof having at least 90% sequence identity to the amino acid sequence of SEQ ID NO: 101 and the VL domain comprises an amino acid sequence of SEQ ID NO: 102 or a variant thereof having at least 90% sequence identity to the amino acid sequence of SEQ ID NO: 102.

4. The recombinant AAV genome claim 2, wherein the anti-Tau mAb or antigen-binding fragment thereof comprises a heavy chain comprising or consisting of the VH domain and a C_{H}1 domain comprising or consisting of an amino acid sequence of SEQ ID NO: 193, 194, or 195 or a heavy chain constant region having an amino acid sequence of SEQ ID NO: 103, 105, 107, 109 or 110 and comprising a light chain comprising a light chain constant region comprising an amino acid sequence of SEQ ID NO: 116 or 118.

5. The recombinant AAV genome claim 4, wherein a nucleotide sequence encoding a furin 2A linker is in between the nucleotide sequence encoding the heavy chain and the nucleotide sequence encoding the light chain sequences, resulting in a construct with the structure: Leader—Heavy chain—Furin site—2A site—Leader—Light chain—PolyA.

6. The recombinant AAV genome of claim 2, wherein the VH domain and the VL domain are linked via a flexible, non-cleavable linker to form a single chain (scFv).

7. The recombinant AAV genome of claim 3, wherein the VH domain and the VL domain are linked via a flexible, non-cleavable linker to form a single chain (scFv).

8. The recombinant AAV genome of claim 6, wherein the scFv has an amino acid sequence of one of SEQ ID Nos: 297 to 305.

9. The recombinant AAV genome of claim 6, wherein the scFv comprises an Fc domain or a C_{H}3 domain fused to the VH or VL domain by a hinge/linker peptide.

10. The recombinant AAV genome of claim 1, wherein the expression cassette comprises a nucleic acid encoding a signal sequence at the N-terminus of each of the heavy chain and the light chain and wherein said signal sequence is MYRMQLLLLIALSLALVTNS (SEQ ID NO: 87), MNFLLSWVHWSLALLLYLHHAKWSQA (SEQ ID NO: 88), MERAAPSRRVPLPLLLLGGLALLAAGVDA (SEQ ID NO: 89), MAPLRPLLILALLAWVALA (SEQ ID NO: 90), MRLLAKIICLMLWAICVA (SEQ ID NO: 91), MRLLAFLSLLALVLQETGT (SEQ ID NO: 92), MKWVTFISLLFLFSSAYS (SEQ ID NO: 93), MAFLWLLSCWALLGTTFG (SEQ ID NO: 94), MYRMQLLSCIALILALVTNS (SEQ ID NO: 95), or MNLLLILTFVAAAVA (SEQ ID NO: 96).

11. A recombinant viral vector, which comprises:
(a) a viral capsid that is at least 95% identical to the amino acid sequence of an AAV8 capsid (SEQ ID NO: 131), AAV9 capsid (SEQ ID NO: 132), AAVrh10 capsid (SEQ ID NO: 133), an AAV.PHP.B capsid (SEQ ID NO: 220), an AAV.PHP.eB capsid (SEQ ID NO: 219), an AAVrh20 capsid (SEQ ID NO: 134), an AAVrh39 capsid (SEQ ID NO: 341) or an AAVcy5 capsid; and
(b) recombinant AAV genome of claim 1.

12. A method of prophylactic or therapeutic treatment of a neurodegenerative tauopathy in a human subject in need thereof, comprising an AAV vector having:
(a) a viral capsid that is at least 95% identical to the amino acid sequence of an AAV8 capsid (SEQ ID NO: 131), an AAV9 capsid (SEQ ID NO: 132), an AAV.PHP.B capsid (SEQ ID NO: 220), an AAV.PHP.eB capsid (SEQ ID NO: 219), AAVrh10 capsid (SEQ ID NO: 133), an AAVrh20 capsid (SEQ ID NO: 134), an AAVrh39 capsid (SEQ ID NO: 341) or an AAVcy5 capsid; and
(b) the recombinant AAV genome of claim 1 flanked by AAV inverted terminal repeats (ITRs),
wherein said AAV vector is formulated for administration to the subject, optionally wherein administration is intrathecal, intravenous, subcutaneous, intranasal, intraparenchymal, or intramuscular or to the cisterna magna.

13. A method of producing recombinant AAVs comprising:
(a) culturing a host cell comprising:
(i) a nucleic acid comprising the recombinant AAV genome of claim 2;
(ii) a trans expression cassette lacking AAV ITRs, wherein the trans expression cassette encodes an AAV rep and an AAV capsid protein operably linked to expression control elements that drive expression of the AAV rep and the AAV capsid protein in the host cell in culture and supply the AAV rep and the AAV capsid protein in trans; and
(iii) sufficient adenovirus helper functions to permit replication and packaging of the artificial genome by the AAV capsid protein; and
(b) recovering recombinant AAV encapsidating the artificial genome from the cell culture.

14. A host cell comprising
(a) a nucleic acid comprising the recombinant AAV genome of claim 2;
(b) a trans expression cassette lacking AAV ITRs, wherein the trans expression cassette encodes an AAV rep and an AAV capsid protein operably linked to expression control elements that drive expression of the AAV rep and the AAV capsid protein in the host cell in culture and supply the AAV rep and the AAV capsid protein in trans; and
(c) sufficient adenovirus helper functions to permit replication and packaging of the artificial genome by the AAV capsid protein.

15. A recombinant AAV produced by the method comprising:
(a) culturing the host cell of claim 14; and
(b) recovering recombinant AAV encapsidating the artificial genome from the cell culture.

16. The recombinant AAV genome of claim 6, wherein the expression cassette comprises a nucleic acid encoding a signal sequence at the N-terminus of the scFv, wherein said signal sequence is appropriate for expression and secretion in human cells and wherein said signal sequence is MYRMQLLLLIALSLALVTNS (SEQ ID NO: 87), MNFLLSWVHWSLALLLYLHHAKWSQA (SEQ ID NO: 88), MERAAPSRRVPLPLLLLGGLALLAAGVDA (SEQ ID NO: 89), MAPLRPLLILALLAWVALA (SEQ ID NO: 90), MRLLAKIICLMLWAICVA (SEQ ID NO: 91), MRLLAFLSLLALVLQETGT (SEQ ID NO: 92), MKWVTFISLLFLFSSAYS (SEQ ID NO: 93), MAFLWLLSCWALLGTTFG (SEQ ID NO: 94), MYRMQLLSCIALILALVTNS (SEQ ID NO: 95), or MNLLLILTFVAAAVA (SEQ ID NO: 96).

17. The recombinant AAV genome of claim 10, wherein the recombinant AAV genome is packaged in a viral capsid.

18. The recombinant AAV genome of claim 17, wherein the viral capsid comprises a capsid protein at least 95% identical to the VP1 sequence of an AAV capsid serotype selected from AAV1, AAV1, AAV2, rAAV3, AAV4, AAV5, AAV6, AAV7, AAV8, AAV9, AAV10, AAV11, AAV-12, AAV13, AAV14, AAV15, AAV16, AAV.rh8, AAV.rh10, AAV.rh20, AAV.rh39, AAV.Rh74v1, AAV.Rh74v2, AAV.RHM4-1, AAV.hu37, AAV.Anc80, AAV.Anc80L65, AAV.7m8, AAV.PHP.B, AAV.PHP.eB, AAV2.5, AAV2tYF, AAV3B, AAV.LK03, AAV.HSC1, AAV.HSC2, AAV.HSC3, AAV.HSC4, AAV.HSC5, AAV.HSC6, AAV.HSC7, AAV.HSC8, AAV.HSC9, AAV.HSC10, AAV.HSC11, AAV.HSC12, AAV.HSC13, AAV.HSC14, AAV.HSC15, or AAV.HSC16 or a derivative, modification, or pseudotype thereof.

19. The recombinant AAV genome of claim 1, wherein the expression cassette comprises SEQ ID NO: 7, SEQ ID NO: 8, SEQ ID NO: 9, SEQ ID NO: 10, SEQ ID NO: 11, SEQ ID NO: 12, SEQ ID NO: 13, SEQ ID NO: 14, or SEQ ID NO: 15.

20. The recombinant AAV genome of claim 6, wherein the scFv comprises SEQ ID NO: 317, SEQ ID NO: 318, SEQ ID NO: 319, SEQ ID NO: 320, SEQ ID NO: 321, SEQ ID NO: 322, SEQ ID NO: 323, SEQ ID NO: 324, SEQ ID NO: 325, SEQ ID NO: 326, SEQ ID NO: 327, SEQ ID NO: 328, SEQ ID NO: 329, SEQ ID NO: 330, SEQ ID NO: 331, SEQ ID NO: 332, SEQ ID NO: 333, SEQ ID NO: 334, SEQ ID NO: 335, SEQ ID NO: 336, SEQ ID NO: 337, SEQ ID NO: 338, SEQ ID NO: 339, SEQ ID NO: 340, SEQ ID NO: 345, SEQ ID NO: 346, SEQ ID NO: 347, SEQ ID NO: 348, SEQ ID NO: 349, or SEQ ID NO: 350.
